United States Patent Application Publication US 2026/0058010 A1 - sequence listing, part 42

SEQ ID NO: 489 - DNA, 2030801 bp, Homo sapiens
  source 1..2030801: mol_type = genomic DNA
tgttgctcaaagatatttttcctgttgaagatacagaacaggggttggcaaaaattttctttaaagggccaggtggtaaaaattgtaggctttataagacatatgatctctgctgatactattcactcagtcatcgccataatacaaaagcagccacagacaatatgtaaacaaatgggcataaaactttatttacaaaaaaaggcaagaagtcagatatggcctgtgggccatagtttgctggttgtagataaagagacagactaatagatatagagaaagattaatttttacatagttatcttgtatcttaacttcataataagtttgctaatactatttttgagttgagtctattatttctatgtgaacaacgtatgaacaaaagatcattttcttctagctttccaatatttacagcaattattccacttttgtaatcttactgcattggctagataactctggagcaatactcagctactgtgctaacaggaggtattgttttgttaataggggggctctgtttttcacctacaaatttgatgttgctgttggtttctaaaaaatgttatcacgttcaagtttcagatacaatgcttgtattcaatcttttaagatcccttctaattcaaattgtttaattatgaagtaattaccagtttttgattgaggctatagacaaatgagtgttccagtgagcaatccatcacccccattgaataccaatgacttgtttttacttaatagagaccttctgaatcttcttgttcaattacatgaacctcaagacaacatagaagaaaacgaattcttccgaggaattagaaaaaaattaagtaggaaataaaagtattttgctttagactttttaaaggtgttttcctttgaggtttttcaataaaaataaatcactaaaataacttttgagtgctaaaggtaaatttagctgaaaattcaataatgttctaaggagattgggggtaaaaggtccaaaggaagataaattactaactctaatatggaagaaaaaaatctaagatgtttatttctgaaaagctttggtctaacatgtaagcctcaagaacatacaactttaaaaatatgtatttaaaattgaaagttaataaatatatatatgcttatatttaaatattttaaaacttcctttaaattagcattcatatactcacaaaggtgtcaatgaaaatttcatgttcacattgcaggcagaaattgattcattattgatataaaattatttcaatcagtcaaaagttttcactttggcattcaccttccaagaatgaagtgaaaacaaatgcaattagtatttccatattcactcctttaatttccctggaaaactaaaaattagtccagctgtaaaaatatgaggcacacattaaagaagagacatgtttaacatcaagcattgtggaatttttctttacaagacgatttcaaggcccagataaataaaaatacttcaggcaatacacagtaaatattttattttaataatagcatagaattcttctgaagaaaattgttatacattatagctattattttacagtaacagagagaaaataaaattagagatacaaatattaaaggccaattatcaaaatgaaattaacacagattattattcatatgaacaatgtaaacagaatcatctatttgatttaacatcaaatatatttttggcatataattatttttacaatgagaattattaattattcaaccaattcaaatatactcattcagccaaaagaacaaaataagcctcttagaaattcaagatttatagattgatattaaacattttctcaatacatagaatattctgatctccattgagttaaactgtacaaacactcatatctattgttttatagcttataattaggtatagcttgtcaccagaactccttgtccaaaatatcactattaattgtacgaggcaaagtcctataataaaattactgtaataatggccacatcttttcaaaaacagaatatggaagtttccattttcatgactatgaatctggttttccaaaattgggttcccaaatccagtttctaaatgtttcaacagaggtgagaaagtaaaggaaataaatgatttaatggaactctggaaaaaaaactatcatagatcttagtttgaaaaatacatcaaacatgagatataccatgaatgactcagaattatataataatgcctatatcaaactttattagttagctaaagggcaaagagtaagaggcaagttaaaggtaatacttgcttttaacaaagcagactaagtaatatgttaagtgttagggtgggataggaaagaactcaggcatggcaaaaatctcctcttgggctttctatataaacatctattttagttttggactgttcaccgagaggagctctccctatccatgaaatgcttcccagaccaacaggtcttggtctagcagctgtaggaaggcagcagtatgaaaatgtaggaaatggaagccaatttgtgtccaaagttagtccaccctaactggactctttttaaactgggttattcaaatgccagcaaaaagtacaggctctagctaaagaacatgaatagacatctgtcttaaaaatgcctggaagaggtcatgattattggccttatgttctcccagaataagaacttacaaagtcctggaaatcctcagctctctccagccacctttccaaataaaatcttaatgaatatattttaaatcctttattgggctctgtaatcccttcaaccaaatagccaagctgcaatcgttttatgtaacatctgtttcactggaaaatgtgggaagttattttgatattgtctagcaagatcaataagtaaacactgatcaccccaagccaaatgatattgcccttcagggagcttttagaaagaaaataaactgataaaccaagaaagcagattgtatgcatagcaaagcccttcagcacagtgcaaacatgttctttatgaggaggtgcaaacccacttggtaatttcaagtgagaggcaacagaagtctttcttaatccaaagtcagaagtttccgaagaacttcaagcacaatatcgtaacaaaagtgatactgctcctatatacatatatataaaaaacaacagaatgttaagtaattgaataacagaatccactttcagaaaacacatttgtaattttcagccacactggaaagttcctaaaaagagcaaacatttaactataaacacttaagaactttacgtgaatacatttttaaaactatgaggaagataaatgatcaaaatatagctcttggcctagaactagttaccttaaggcttaacataactgttttttttatcattatccatattctattaatctaccctcccaatgactactaacaaatctgtgacataaatgatgtctttttatgacgtcctgataaccttgacagtttagtggcaagtaaatatctcaaactgctatccagaaatgttttaaaaataactttagatgttacttaaatagcacggcattatggacaaggcatgtgtttggacacgaggagacctcaacttcaggcttggctcctccccttctatctgagtgaccccatggagcaggctttattgctctgaatttgaagtacttggtcaggaataccagagaatcagagcaaaactaatgtctacctcaaacagtaggaattcaatgagattatgtcaataaaagagcttttaagtggtaaaatgttatgcaatgttaatctttatattcattattcttattattatgtatgtggtgaaagcttaccttcgtttgaaccatgccagaacgttgttctctcatttgggccactatatccatgatgttgaactgtaataagatgacagtaattttgtatgatccacatgggggaaaaacacaaattcacagattgccaaaaagggtgaaagagatgtcaagatttaatcagaaagatctcattttcactcacaagaaaatgtgctatttttaacttagcccaatggataaggaagactattttaataggttttcaggagaaagcaggaagcaatcattcataataagaaatgctctccaaaataagtaataaatttgcccttgtgtgtccctgtttgttatccaaaggcagaacttaaagcagcactgtaattctggaaaggcacagaagactttctctggccccaacaatagcatatctgtttcttatatgaagatccctgtcaactcacacggaaactgggagcaacagtcgacccaacactagattccagactgtgtgtggacaccagtacagctgggtgtggtcattgagttggtgcaggcctacaaaggtctgttgctggtccacaatgagtcaagaaactgggagtaagtgctcagaaactcttatggcaatttgacactggcacagcactgagaagtgtgctcaactgaacaggatatagaccagctcaggtgttgctgaacttgcctggagagtcacatgtgggacaagctgagaatgagtcgtttcagcaagacattgtggacacatgtaaatgttgtcaactgtaaccccaaagcatataaaaatagaaaacaataagcattcctttattttcatagcttatcatttttataattaaaatttttaattaaccctttgaaaaaactttttgttttttagagacagggtcttgctctgttgtctcagctgctggagtacagcggtgtcatcatatttcactgcaatctcaaactacaatcctccctcctcaacctcctgagtagcaagaactataggtgcgttccaccatgcccagctaacttttttatttttatttttgtagagatggggtctccctatgttacccaggctggtttcaaactcctggcctaaagtgatcctcagccttggcctcctaaggtctgggattataggcgtcagccaccatatctgccataaaaaacattttattttataatacagatatacaggaagttgtacagggtggccctgtgtatctttcacccagtttcccagatggtgtcatcttgtttaacaagatataatatcaaaaccaggaaactgacattgggacaatccacaaagcttaattcagatttcaccagttttacatgcaactgttagtgagtgtgtgagagtgtgtatgtgtgcatgtgtgcatgcacagagctccatgcaattatatcatatgtgaagattcatgtaactataaccacagtccagatacagagctgttccaccacaagacttcctcctgctatccctatagagtcacactcatccaccccaatctctaacccttggaaaatagtaatctgttctccttctctatgcttttgctatttcaagaagaaatagcaaaattcactatatgaataaaattgcacaatagctaaccttttgtgattgacttttttcccacccagaataacttggagatccatccaagttgttggtgtaacaatagtttgcttccttttattgctaaataatattccatgatgtggatatgtgccactttatttaaccatcaatttgttgaaggacatctgggttgttctggtttttggctactgtgaatataatctgctatgaacatttacatacaggtttctgtatgaacataaattttgattaatctgggataaatgccccaagagtgctattgctgggttatatgtcaactttagttagttttgtttttgttttctttccaagaaactgctcaattgttttccgcagtggctggtaccagtctacattcccaatgtctcatacatatgggtaatgtatgagcaatacagtttctccaaatcttcacataattctccaaatcctcaccagcatttccaaatcttcatcagcatggggtgctgtcactatttttacataagcctttctgataggtgtgtaatgctactccatcctggttttaattagcatttccccaagggctaatgaagctgagcatcttttcacgtgcttgtcatctgtatgttctctttggtgaactgtctgttcatgtcttttacccatttctgtttttcttttttttttaactattgatttttgagggttccttataaattctagatccaaggcctttgttggatatgtgccctgcatatagttactctctagcttgtttttttttttttatcctcttcattgggtctttcacaaaacataaaattttagtttgctttccctctgagatcagtgatggcaacaacgcctgctctcaccactcttattcaatatagcacttgacattttagtacagcaataagaccagaaaataagtaggatgtatacagattgtatacagatcaaaaaggaagagacaaatctatatgcacatggcatgactgtctatgtagaacacactaaagaatctaaaaaaaaaaaaacctacaaaacctctaagagctaataagtaatttcaacaagatcacagggtacaagatcaacaaatgaaaatcaattaaatttctacgtactagcaatgaatatgtggaaactgaaagtacaaacacaataccatttacaattgctccaaagaaaatgaatagggtaaatttaacaaaacatatacaagatctatacactgaaaatgacaaaatgctgatgcaagaattcaaagaagacctaaataaatacacttaccatgttcatggattggaagattcaatacagtaaagatatcagctctctccaattaaactacagatttaaagtaatttccatccaaatcccagcaagttttgtgtagatgtagccaaactaattctaaaatttattagagaaagcacagaccctaggatagctcaaacaattttgaaaaaggagaataacgtgggaggaatcattctatctgatgttaaagcttactatatcactacaataatccaaagggtggtaccggcagaaggatagacacactaatcaatagaacagaatacggaaccagaaataggcccatacaaatatgcccaataatttttgacaaaggtacaacaataattcaatagaggaataacagaattttcaataaatgatattgaaacaactagccatcaataggccaaaaaatgaatcttcacctaaatttaataatttattaactcaaaatggactatggacttaaatgtcaaatatgaacttacagaattttcataaaagaacacaaaaaaattattcaggccctcagctaagtgatgagctgttagacttgatatcaaaacatgatccataaaaggaaaaactaataaaatacaatctcatcagaattaaaaactgtaacttctttaaaagcatttttttaattataatttaagattaggcaaattatggaaatacatttgaattactaatttttaatcagtttactgactataaaacaagcatgactggactgttcagttaagaaaagacacagctttccaaatgtggctgtagtggttaaccaaataatgaagatggaagtgactgcaatgaaatgaagacaaagagttatataattttcacttggagttatgattcctcatatattgagttttatagtcattattgattgtgaagctctaaaactacacttgtgttatttccaaagatgtactggttaacaaagcaaaggaaccattaagacttatttgtaatttacataaaaaataattaattcaaagataaaataattatcttaaagagaattagattaaaaagacaagagaggacttctggttccaaaataacagtgtagaagcaagctggcttcacttctttacaaagaaaaccaaaaccaaatatacagcactgaaattatcaccaacaatatcccagaaatcaaatacgaggagaagacagttcctggatccacagagatgggaaaaaaactctaagtaggcagtaagagaattgggtttccacatctgcaatgcccattcctccaatttgcccagcaccaagagtgcaaaaaatctccacctgattcatgatttctataccagaaaaggtgacatccaggtttcccaccatctgggttacctggcaggaaacctgtccctacctcaacccacaggaagcactacatgtgcctgaagaaagaaatatcctgagaacagtcagaaacaaacaggtgaggtgggactaccatccccagccctggaaactctggtctgtaactcagctaaaggagatgccaaaccagagtggttgtttagtagcaccacattgcagaagatacattgcacaggacccctgggcatgaatctctagccacctttcccacactgccatgatatctcctttgagactttccctaattggaatgagcagctctcttattgtttactggagccaaggcaaacttggtcgtaaggtgacatctagtgccaaaaagaaggcagcaacttagcccctcaccaaaaaaaaaaaaaaaaaaaaagaaaaaaaaaattcgacaggtaaattacatagaatctataaccaaatacattcaataaaaaacaaaaataagccagacagagaacactggaataaataactaatccttcattcaaagacatcaatacaagatatatatttcttgcacatccagaagaaactgcagtcaacacaaaaccatgacctccccaaatggataaagcaaggaaccagtgactgaccctcatgagatagccatataagagctccctgatcaaaaattcaaactagtattaatagctttgaggaaactcagagatctccaaggtaacagaacaccaattcaaaaatttattagacaaacttaacaaagagattgaaataatttaaaaatcaaatagaaatcttggagctgagaaatatattagctgaactgaaaaattcattacagcctcacaatagcagaatgaatcaagcagaggaaagaatcagtgagcttgaaaaccggctacttgaaaatgcagtcataggtggaaaaagaataaaaaagaatgaagatcatcaccaaatatagacaattacctcaaaagaccaaatccaaaaattactggtgttcaagagggagttgaacaagagcaaggggtaggaagcttattcaaagaaataataacaaaactttccaaaatgcaacagatataaatattcaggtataagagcatcagggccgggcgcggtggctcacgcttgtaatcccagcactttgggaggccgaggcgggcggatcacgaggtcaggagatcgagaccatcctggctaacacggtgaaaccccgtctctactaaaaaaatacaaaaaaattagccgggcgtgatggcgggcgcctgtagtcccagctacttgggaggctgaggcaggagaatggcgtgaacctgggaggcggcggagcttgcagtgagccgagattgcgccactgcactcccgcctgggccacagagcgagactccgtctcaaaaaaaaaaaaaaaaaaaaaaaaaagagcatcagagaacaccaaacatattcaacccaaataaggctacaccaaagcataaaataataaaactctcaaagctcaaggatagaggatcctaaaaagtagcaggagaaaagaagtaattaacatataaaagagctccaattcatctgacaattgactctcaacagaaatcatataggccaggaggaagtgggataaattttcaaagtgttgaaagaaaaaaaaaacctgttatccaagaacactatattcagcaaaggtacttttaaatatgaaggagtgataaagtatttttcagataaacaaaatctgaggattcaacagcagcagacctgacttacaagaaatgctaaagcgagttcttcagaaggaaaataaaaaaatacaaaaaaccacatacacattcaaaaagaaaacttttcaaggcataaaatccactggtaacattaacaacatggacaaaaccagaatactctattattgtaatgatggtgtgcaatccatgcctaactctggtatgaagctgaaagataaactcataaaaagccgtaatagctacagcaacctattaagagaaaggtaatataaaaatacacaaatttagataataagcagttgaaatgtggtggggatggagttaaagcatagagtatttttttaaaattttttctttgtttctattctttactttgtgatctaagataagttgtcacttctttaaaatagcttattgagatccactcaaggcaaaaagaactgggaagtccccacagctgtctgctgggcagaaaaccctaggctatgggtgccacatcagccatacacccacggcaacaccgccctgcctggagatctcacacccttgacctactgcatcaacaaaccatctgtaggtctactgcacaattagctctgactcccaagcacagaggatcagcaggcctccagtgtgctgtggatctcctggtgacctaatctttggctcgagctgccccaagggaggagagagcacaggctgccagggttccccttggggttaaagagatgtgggcatggtgccagtgactggagggggctcccctaaggcctggaaatggacctggcaggggatcatcgctaccccttcccaccacccccactgctgcaaatgtgctggaatacaaaagagccatgtgactgagagtctatttgccggccattattctcaagcaccatctactggattgaagcctaaattacaacaccccaaactcttccagtatacactgcctgtgaaatccagtgccagaatctagccacaagtattaataaatatcccatacagagtgttggccctctgaaagcacccagaaataaagccaactgactatactcagcttatgctacagtcaaacccacaagggatacaaagaatataaaaacaaaaagcctcatcgaaatgatagcaaattcaacaagataaaagaacacgtgccctctcagaagagaaagatttaatgcaagaactttggcaattcaaaaagtcagtgcctccttatctccaaacaattgtactagctcgccagaaattgttcttaactaaattgagatggctgaaatgacaaacatagaactcagaatctgggtggtaaggaagcttaatgagattcaggagacagctgaaacctaatccaaggaatttggtaaaatgatccaagagttaaaaagttgacaaagccattttaagaaacaaacaaactgaccttctggaattgaaaaattcactacagaaaatttcataatacagttggaagcattaacaacggaatagaccaagatgaggaaagaatctcagagctcaaagattggtccttcaaatcaattcagtcagacaaaaataaagaaaaaagaatttcgggccaggggtggtggctcatgcctatgatcccagcactttgggaggctgaggtgggaggatctcttggggccaggagtttgagacctgcctggccaacatggtgaaaccccatctctactaaaaatacaaaaactagtgaggcttggtggcacgcgcttgtagtcccagttactcaggaggctgaggcatgaaaattgcttgaacctgagaggtggaggatgtagtgagctgagatcacgccactgcactccagcctgggcgacagaccaagactctgtctcaaaaaaaaaaaaaaaaaaattgaaaatgaacaaaacctccaagaaataagagattatgtaaagagaccaaacctatgactcactggcatttctgaaagagaagaagagtaaacaacttggaaaacatatttgaaaatatagtgcgcaaaacttttcccaatctcactagagaagtcaataggcaaatttaagaaattcagcaaagtcctgtgagataccatacaagatgaccatcctcaagacatatagttaacagattcaccaaggtcaatgcaaaagaaaaaatcttaaaggcagctagagagaaaggtcagcttacttacaaaggaaatcccatcaggctaggagtagacctctcagcagaaacttgaaacttacaagtgagaagaaactgtggacctattttcagcattattaaataaaataaactccaaacaataatttgatattcttccaaagaaagcttcataagcaaaggagaaataaaatccttttcagacaatcaaagctaaggaaattcatgagcactagaccagtcttacaagaagtccttaaggaagtgctaaatgtggaaatgaaagaacagtacctggcaccacaaaaacacaagtacatggcccacagacaccataaaggagatacacaatcaaatctacaaagcaaccagccaacaatgtgatgacagcatcaaaatctcacatattgatataaaccttgaaggcaaatggtctaaatacccaacttaaaaggcttaggatggcaaaatggattaaaaaaataaggcccaaccatattctgtcttcaagagacccatctcacatgtaagaacacccacaggctcaaagtaaagggatggagaaagatctatcatgcaaatggaaaacaaaacgaaagcaggggtcactattcttatatcagataaaacagactttaaaccaacaatgatctaaaaggacaaagtagggcattacacagtgacaaagggaaaaattcaaaaagaagagttaactatcttaaatatacacacagctaacattggagcacccggattcataaaacaagttcttctggacctatgaaaagacttagtcacacaataatattgggagccttcaacacccaactggcaggattagagagatcatcaaagcgaaaaattaattaataaagaaattctggtcttaaattcaacacttgaccaattggactcaataaatatctacagactagtccactccaaaaccataggatatacagtcttcttatctgcacatggaatatactctaagatcgactatatgctcagccataaagcaaatctgaaaaagattaaaaacactgaaatcatctcaagcatactctcagaccacagtacaataaaaacagaaattactaccaagaagatctcccaaaactacacaattacttggaaattaaacaacttgctcctaaatgacttttgggtaaacaaatgaattcagaaatcaaaaaaattctttgaaattaatgaaaacagagacaaaacaaatcaaaatctttgggatgcagctaaagcagtgctaagagtatagtttatagtgctaaatgcctacatcaaagaagttaggaagatcttaaatgaacaacctgatgtctcacctagagaaactagaaaaaaagaacgaatcaatcccaaactagcagaagaaaacaaataaccaaaatcagagcagaactgaatgaaattaagatggaaaaatgcatacgaaagatcaacaaacaattttttttttttgagatggagtctcgctctgtctcccaggctggagtgcagtgacacaatctcagctcactgcaacctctgcctcttgggttcaagcaattctcctgtctcagcttcccaagtagctgggactgcaggtgcatgccatcacacctggctaatttttgtatttttagtagagacggggtttcgccatattgatcaggctggtctcgaactcctgacctcaggtgatccacccgcctcggcttcccaaagtgctgggatcacaggcatgagccaccgcgcctggtctgttttttgaaagaataaacaaaattgatagactgctagctaaacaacaaaaaaaggaaaatctaagcccaatcagaaatgacaaagatgacattacaactaatcccacagaaatataaaagatcttcagagattattataaatatctatgcacacgaaaaatagaaaatctagaggaaatgagtaaattcctgaaaactcccaagattcaaccaggaagaaattcctgttcaagaaaacctgaacagaccaataatgaattccaaaagtgaatcagtaataaaaatcctaccaaccaaaaaaagccctggaccagacggattcacagctaaagtctaccacatgtacaaagaagaactgctaccaatcctactgaaaccattccaaaaaattcaaggaggagggactcctctctaactcattctatgaagccattatcaacttgataccaaaatctgacagagacacaatgaaaaaaaagttcaagccaatatccccgatgaacatagaggcaaaaaaaaaaaaaatcctcaacaaaatactagcaaaacaaatgtaacaacacatcaaaaagataatgcactatgaccaagtgggatttatccccagaatgcaagtataatttgacatatgcaaatcaataaatgtgatatatcaacagaatgaatgacaaaaaccatatgagaatcttaatagatgtggaagaagcatttgataaaattcaacatgctttcatgataaaaaaaaaaactctaaacaaatgaggcatagaaggaacatatctaaacacaataaagacgatatatgacaaacacacagctaagatcatactgaatggggaaaagctcaaagcctttcttctaagaactggaaaacaggtcaagaatgcccacttttaccactcttattcagtataatgttggatgtcctagccattgcaattagtcaagagaaagaaataaggggcatccaaattggaaaaaaaggaaattaaattgtccttctttgcatgtaacatgactatatattcatatattcatatatatatgtatatatatatatatcccccaaaactaatgactctaccaaaacactctaagaactaataaactaattcagtacagttgcaggatacaaagtcgacatacaaaaatcagtgatatttctagactccaataacaaactagctgaaaggaaataaagaaggtgatcttatttacaatagctattaaaaaaaaaaaacacctaggataaatttaaccaaaaaagtaaaagacttctatgaggaaaactataaaacactgatgaaagaaacgaagaggacagaaacaaatggaaataatcctatgctaatgaattggaaaatggaatactatgcagccataaaaaaagagtgacatcctgtcattcacagcaatatggacaagtctggagaacattgcattaagcaaaacaaggcaggcacagaaagataaatactgcatgttctcatttatatatgagagctaaaaaatcaaactcatggaagtcaagagtagaactgtgggtattaaagatgataaggaaaggttggctaacaaatacaaaattaagctagataggaggaatgagctctggtgttctgcatcactgtagggcaaatatggttaattataatttattgtatatatttaaagagctaggagagaagatttttgatgttcacaacacaaagaaatgacaaatgtttgaggtgatgcatatgttaactaccttgatctgatcactacacattgtatacatatatctaaatatcactctctgtaccccacaaatatgtacaattattacatgtcaactaaaaataaaaggaaaaacaacatagatggaatcattttaacagataaaacttgagaataaaaataatcataaaggaaatattgtaatcatcacatctgattcctgtgtctatctcttagctggttccaaattaaaaacaaaagtaaaggattgtgaattattgactcaaactcaattatattattatgtttattttgcaaatgagaaaactagatttgagagaggatgagcaatttacccaaagtcaccaaaatctaaagtatgtggcaaaacaggcagtcaaacagggacccctcattaactcagaagtctacattttttctcacattcttatgtgcttgtcacttatattcattaaaaacaggcacattccatcaacattctctagtaagagtctaaacaccccgtgtaagatacagggaaggaaaaggaaatggaactcacattttctgtgtatctattatgttccagacactgtcctaagccattatttacaatacatactttaatcctcacaaacacccccaggaacctgcagcaagttcggtgagaatcaggtatccaaagctcatgtgcttttgatttactaagttgcttttgaagaccaaatattagtcttccaaatgatcaggctattaaatgtagtgtgtaaacaccaacagcatcagtgtatctgcttgattcacacacttactgaacagttctttacgatggcacagaacacgacatccacacataggaacacccctgtccggcctatgccggcactgcagtgaacaaccatgggtcctgtaaggtggctcttccttgcataacgaatatattttatgaagctatctgctgaggcaggagtgccatggtctggccacttggtgaactgcaactgttttacagagtgactagttcccgtctgttagagaaagaaacagagcgagaaagacatttattgatttcttatattagagacctcacgccaacttctaatattcaaatgataataataatggctatatggtattaccttggtattatatagaactttcaaaaagtactcaaacctctttttgatgtttataagaattctggaagttgctaggaatagaggttttctccattttacaaaggagagcacagtaacaacaataaaaataccagtattaacaggcaacaaaaattaagcacttgctatgtggcagttactatgctaggggcttcacatgaattctctcctttaatcttcacatcaaccatgtgagataggcaccattttatctccattttacagatgaaaatttaaggatgagggggacgagagatgtatgctaggtcagaaggttcacacgtttagagctggaactgtaatgtaggtgtcttgaattctaatctaccatcattcttctgtaccatgaggctacaggaaaaccaagatttcaaaatgcttagagtgagagatggactgtcatgttaggaataagaccaaaaggcaaagtatcttagtttagaaatgacatatgaaatttaattaagacatataggtgtctgacaagagaggcaccgatctcttccagcgatgaagacagggtagtcaatgaccatgagagtagattgtgggtcccactattgtgctgagcccccttgaagtggagtcatgaaactcttcccagcattgtcagataaagcactttgaatttacctatatctcatccaaagggatcatgaccctttcctcagtgtggggcccttattttatcacacatgggaacctaatggaagaactcaaaatgagtttctcacttctcctatgcttctcccgaatgcacctctttttcctaagctttctgaataaagatgctagtgctcagagctctattctaatccacagtgtcgactgaaatttgtgatagttaattttatctgtcaacttggctgagccctggtatccagatactaggccaaatattattttgtgcctctgtgaaggtattttttaggtgagattaacatttaaattggtagaatttgagtaaagcaggttattctccataaagtgggttggcttcatctaatcagctgaaggccttaagagaacaaaaactgacctcccatgagcaagaaggaattctaccagcagattgcttttggactcaaactccaattcttccctgggtcttcagcctactttcccaccctgcagatttgccaaccctccacaatcacttgaaccaactccttaaaattaatctctctctctggatcagtcccataacctgtattcagggatctcaatgttatactgctagaaaaatacacataatcacatattttgttgctactacaaatgtatgggtcaaacctcagcatcactcagcaacccttttcctggtgattgtgctccaatcaacttctttggtgatgactccaaaactcaccattctctgcaagtttcctgttcaactcctattcccttcactcttgttaacacatgtatcacctacctgccaactgaatccactagagcaatctaactcattgctttctcctataaaccattccttttctgttttctaagtctattagaccaaggaatccatgaattattctagaccaatgcttctcaacagaacttcctatactgaagcaaatgtcttaaatagtggcaatatagtagccactatcaacatgccactcataagccctaaaatgtggctacttgcaggtgaggaactcaatttgttattttacataaatttaaataacttaaatttaaacttaaatatccacatgtggttactgtattgaatatattttcaacccctcctctgtcacttataaatcataagtcataagtcacatatgtctcccaattttatctgcaaaacacttgcgtctgtgctttccacccccatgccaacagccgtagttgatcatgtcacttactaaaattcttcaatgtctcccaattatcttcataataaagttcatgctacttagctgaaatttaagacatttcacattctagctggcccctgcttacttttgagaacctcatctcatcttttattactccctggcactgaacttttacatttcagaaacacataactacttatatttgtctctacacacaccttatgctattttatattttgatcatctactttctccctccatctttttcatttgcataattctcaaaacaaatgccacctcctccagtaaacctgtctcaaaaccccaagtaaagccaagtgtttaccttctgagccccaaagtgcccaagacatatctcaacattatcactgaacacggtaagttaggtatctatcagtgagtgtaaccaacctctccactattcggtaagtactgatagtgcctggcccagtgattagcatactttaaggactcaatacgtatctgctacatttggcagaggcaggtataacccagaatcagacaacttcaacagtcactctccctgccccacctctcttttccaattttttcttctccacagaatctggttgaggagaagtagaagtggtggtggcttctggtaccagggacaagtaaaaagttacttaagaagtatcatcgatcgattttccatcctactcctaacttctagttctaagacatctgcttatgtggtgaaacatatatctaatactgatgtttaaaaacttacggacttctccacaacttgaaacattcgaatgatgaaatattgaagtatctggtagttctccaggaatacacggaagtgtttcaattccaatggcttcttcagagaaatgggccagtaatggtagcatttgataattccaccttctatctctctggttatcatggcaataacatttgaattattttccaacaccatttgccaaaagtcatctatggtgctcagcagtggtccttgagtagcgatataaaaatactcttctccacaattgactattctaatataactagcattgatgtagtccttgctttttccaagaggaacgcgtgttgaatcatctattacagaaacagaaacatctggtagataaaggtgggagatacatcacacccagacttcacgaaaggatttcacacatgtaaatccatatatctctttgaccaatagagaagatggcctaggagtttcttttcaaaatggttgagtccatgagtttaaattatttcctccctgaaaactattggcatgacctaagaaatatacaattatgggatgtttatttttcaaatcagtttttaataaatgcagaatgatatcattagcatccaggtacttttggaaatttctgctagaagtggcatgggcaaggttaagtcaagggaagtatcctatagtttgcaactgaacacaacagaggagaaactctttgtgggagtaaatgagtgatattatcctgcaaatctgaaacctgcaaacccagagcagcaggagccaggggaaaaaaaaaatctgatagttgactgcagacaaattctaggattaatggaattccaccactgtccccaaactagacagccatattttatgtccattctcagccttcatctggtgataggacatgttattcaaagcaaagatattgtggcaaaaggatgctaccaaggggaattgctccaagtaatatgggactcatctaacatggactgttataacaaatacgagagggaaaaccagctatttggcctactaaccttcactgctccaggagttccttcttcacctgacacagacatctgaagctctggttccaccaccatccccacagtgagagcagaaacacacacagcaaaggaggcccttctctgccatgcagctctctcaccaataacctctccttactactcagaatcacatggaccacttatctagtaaatatgctgacaagacctgaacaggcatttatataatatctggcagaactcttctcaaattttaacatagcacacagaaactttcccttgtaaatatgaatgaacagaaaaaatcagccaggcgcggtggctcacatctataatcccagttactcaggagactgaggcaggagaatcgcttgaaccagggaggcggaggctgcagtgatctgagaccgcgccactgtacttcagcctgggtgacagaatgagtgagactccatctcaaacaaaaaaaaaaaaaaaaaaaagctagatatataaagatacccggtatttcaaaaagggagaccattctaaaaaatcacaacaaatattctcctttctataaaagatgataacaccttaaaaactcctatttgtatattaaataaaattcaagagagcattaattatttaaaacaatactttatacctatgtttactaacaaatatgttatattactaaattataaaggtgataacaatggctttgtagggagatctttcatcatatttatgtagatatatgatgatatatgtcatataataataataagcctggcaagtgttcatcacaatgttagcagtagttattacagtatctaaaccatataaattacttcatagtaaaaaaagcattttttaaattttgaaatgagattaaatatgtgaaaattaaataatctaaaataataaaagcttgatttcatataaaagtcacaatcattcaactcaaactcctaaagcaggaattgaacagaaaaacaaatttatgtttagaaaatcagcttaaaaaattttcccagaactcagaaaaaaaagattaaaaaaacctacaataatgattaaaatggtaaaagacacagcgcatacaaggggaatgtaaaaaacgaatttcagaagcaaactgtggaattcactgcagaaaagaaataattcaagtgatcataggaaagctccctaaacagaagcaggagtactaacagaatgcagtgaaacatgcataccaggttcaagcagcatgatacgctacatgtatcaccttgtcaactccaaaacaaacctttgagggaggtgctattatattcatacttttcaaataaagaatctgtacaaagtaacttgttccatattatgcagcaatcttctagactccacagactaggtaaatctagactctggtccaaaaataattccatgctctgttgtccatcaaggaagactcaagtttgcagacagaaaggcctaagtgtcagacaacattaatgaagagagccactaagacccctagaccagcagagcataaggccacaggaacaggaacaggaagcaaaaattatgctaatggatgactaggggtaatggcaactggtgccactcccatttccaccccttgattcttgaatcttggctatggtagaaacagcatcatatattggatgctgacatggggcatgtataatctcctgaagaacattaccccagccctgcaaggtactgccacctagctttcactgtaattgagtcttcaaaaggccattcatccattctgtcaagccagccgctttgagaggataaggaatatggtaacatagtggcaatgaggccattgccacaaggtatttgccacaaagtgagttctttgattacagcaatgctgtatggaataccatgatggtggataaggcattctgtaggtccacagatggtaaattggtgggagcactgtgtgcagggaaggcaaatccatacccagagttactgtctattctagtaagaaaaaagcactgctccatgcattatggaagtggtcccagtgtaatcaacctgccatcagctagctggctgatcatcccatggaatagtgcccatcaggtactcaatgttggtctctgttgctggcagattggacactcagtagcagctgtagccaggtcagccttggtgagtggaagtccatgttgctgagctcatacataacttccatccctgccattatggccactttgttcatgagacctatgggcaatgacacaatgacaggggtgactgggggtatagtctagctgatattcatagagcatgtcactctattcacctgattattaaagtctgcccctgctgagatcaacctttggtgagcattcacatgggatacaaatatctttgtgtttgtgcctatctagcaagatctattcacgtgcctcttccccagaccttattgtcaccaatttttccaaccatgttccttcaaattccctgaccatccagctaagccattaaacatagcccatgaatcagtacacatttatacgtctggccatttctccaagcaaaaaacaaaaaaacaaaaagcaccaagtgcactacccaatgttctgcccactgggagttatttctcttcaccactgtccttcagagatgtctcaaaaaaggggctgtagtgctatagctgtcctcttctggctggtacctttatatcacgcagaaccttctgtagaccaggtccaagtcttctcttcttctgtcagctgatcataggcaactcctcatgagacaacaggtgctggctgaagagagcaggtaatgtagcaggggtgggaacagtgagcatttgggcagcttcttcgtgtaacttatttgtgccttcaggatctgctcaagcccaatgttgtatctaccactttcatttgatggtggagtgctgctgtgtatgcccaactttatggcttggtggcccatagttaagcattctctacttagttctctatgaagcagtctctaccaaggcccagtagcaggccaaaagctgtttctcaaaaagagagtccagagagggtggcaggaatttgctctaaaatcctacgtgcctgcactgtgattcatctaaaggggtctgccaaaggtccaaacagcatccttatctgccaatgacacttcaagcaccactggatctgctagatcatacagcccacgtggcagagaggcttgcatggcagactgatcctgtttcagagccttctcttgttttgggccccactcaaaactagcagcttttcacatcacttagtaaatggaccagagtagcacatcaaaataaggaatgtttcctccaaaacgccctggttcactagccattgtgcctcttttttgcttgtaggaagagccagatacaatttatccttcaccttatgattatctccacatgtcccacaacactggacctctagaaatttcactgaagtagaaggccactgaatttttgttggatatatctcctaccctctgacagacaaataagactaaagcatttgctacttcttgttcactagatccaatcagcacaatgtcatcaatgtaataaacctctgtaatatcctgtggaagggaaaggtgactgagatccctgagaactaaactacaacatagggctgaagagttaatacacccctgaggtaggacagtgagggtgtgttgttggccctgccagctgaaagtaaactacttttggtgttcttgattaataggtatagagaaaaaagcatttcccagatcaatagctacatagcaggtatgaagagatgtgctgattttctaaggcaatgaaactatatctggtatagcagctgcaactagagtcaccatctgaggaagcttacaataatccactgtcattctccaaattccatctcttttttgtgtaggtcaaataggtgagttgaatgggatgtgatagatatcaacatcacttcatccttaaagtccttgatggaggcattaatatcagcaatctcttcaggaatgtagtattgcttttgcttttttactattttcctaggtagaatcagttctactggcttccactggccctttcctgccataatattcctcactccacaggtcagagaagcaatgtggggattctaccagtttctgagtatgtttattccaattattcattccagggcttggaaaataatcacaagatggttttagggacctactgagtccactgtgaaatgaacttgaactaaagctccattgactatctgacctccataagcccctgctttgatttgtagaccacagtgatgttttgggtctcctggaattggtgtcagttcagagccagtgtccagtagtttctgaaagttctgactattttctttttccaaatgtacagtcaccctggcaaaaggctatagatccctttggagaaggctgaaagattaacagtatacatttttagcagtgtgccagggtcctccctttcattcaaggtgttctctgtgtgtaaactggctcaagtctgggaagttattgactggttgtgattctctgttcctatggttcaggttagaattttgctcacttgacctagaactcttctgcttacacctatcaaggaagaatttagtagacgtcccatctagttcacttctaggaacaccatgatcaactaatcaacaccacaggtctctacaggtcagactgttctgattgctgctttgactctgctattaccataccatgctcaccttgcctttggctatcaagtgccaccacctggcccttatctctctgggatccaattatacccactgcattcaggtttcccaactcagtggcagcaatttccactgcaatatctgaactacagagaagaacaatcacagtattcttcaaggattctgggactcgcctcacaaatatatttctcacagttatgagaaaagtacatcctctggacctcctggggtgggttggcaggtcttaaatgataaacctaatctaatattccaatctccctaatcctttggatcacagtatatagtatatcgaggcagttctggcattttatcttcatttagactgggccaccttttggtccatttaatacaaccaaccaaataaactgtaagagctctttctaactccctaatccacatattaagtccagaatctcttctttgtggtcccatttcaataaattcagcctgatcaaacactaagttccttccaccattgtcccacacccttaaaatccctccccacaaatatttcccagatttctgtcagtataaattggaaaaatcatgtagctcttttgtagcgtaacatacctccccatgggtcacactttgtaccttacctttaagggcctgctgggacttgagtctagttataggtctagaagcaatgaaggatggtagctgtgagtcttgagaagaatcagcaatgtcttgcaaggcaacaaactcaggggaggtaataaaagtttcctcaggtaaagtagcatcaatctcctcagatgggggtggcatggctgcttttactggcaaggaagactcatcagggtcaaggggttcgatacacccagctttataaggctcttcacatatgtctgcactccagttttcaagatcccattccttctcagttaatgccctcattttaacagcagacaccctaaaagggtggggattcaatttgcactgtaattcagccattttcaggatgagattttgggtttggttttcaataatctcagctttgttgttataaaatataagagtttctttcagggcagaaagagaaacttttgggttattcatgcggcacttgagctgggaaatttaatccctaagatcatcctttccttctctacattaggagtaactagccaatctcattgttctcatgagaactcaaaaatgttctaaggtatcaaatacagatgcccagaaccttgcttcttgtaaatgtctgaataggattacctaatggcaatactttgcatatctctactgtcacattacactatgaattattaatactctattcactactgaaaagtcattaatgcctttacatcttatcagattagggaagtaattcataaaactcatccttaaaattctgttcctctagaattgctctcagtaccaaattctgttactctagattctctagataaatagaatcaataggctgtatatatacagtgagaaagatttattttaaagaactgactcatgattgtggggactggcaagtcaatatctgcagggcaggccagcaggttagaccccagggaaaagttgacattgtagtcttgagtgcaaaggcagtctggaggtagaattccttcttcctctggaaattttagcgtttttttcttaatgacttcaactgactgaataaggcccactctcgttatggaggctaatcagctttactcaaagtctgctaatctaaatgttaattacatcttttaaaaaataccttcacaccaacatctagactaatatttgaccaaatagctgagtatcatagcctagcctagttgacacatgaaattaaccattaaacaagctaaaaattttagtagatgatttgaaggaggaaattttttaaaaacttatattagtttcctataaaaccaagtgaaagaaaaaaataagaataaaaatgagagagagagagagatagagaaagtacttgcaaaactacagaggtaaaagaagtaacgagaaaaggttttataagatagaaccaagaggcaaccctaaaattcatagaaactaaaaaaaaaaaaaaaaaagacaagagtagactgaagagtagaaattacaactaaaggaagatcaattaaagggtttatttgtctaggtaagaatgatggaaatgaagcatacctggtaacattatttaattccaggaaaatagttaaagattttgaaataaaagagcatatttctcatgaagaaaaggagtcagatggccattacagttctcatctaaaacactggaaggaagaggacagtgaagtaacactcagggaaaaaaaatgagaaaaaaaagaactaaaacccaagattcctaaaaccaacaaggatattcgtttatcaggataaaaaaaaaaaaaaaaaaaagtagagcttgagactgcatcaactacttatacccatctccaatcaaacaattaattcatcagaacagtgatttcaaattaagggaaaagggaaagaaaatgaagtaatagcaacaaatactacaaaacatagtttcatatctataagaagaatgacgagagccaggcattccagctacttgggaggctgagacagaaggatcacttgaagccaagagtttgagaccagcctaagcaaaagcgtgagtccctgtttctaaaaaaaaaataaatgaataaaaaattagctgggtatggtggcacatgcccatccccatagtcccaactacttgggaagctgaggtgggaggattgcttgagctcaggagtttgaggtttcggtgagctatgattatgctactgcactccaagtagactctgattcttaaagaaacaaaacagctctgtgcggtggctcatgcttataatcccagcactttgggaggccgaggtgggtggatcacctgaggtcaggagttcgagaccagcctgaccaacatggagaaaacccatctctactaaaaatacaaaattagccaggtgtggtggcacatgcctgtaatcccagctactcaggaggctgaggcaggaaaatcgcttgaacccaggaggcaaagggtgcggtgagctgagactatgccactgcactccagcctgggcgacagcgagactccatctcaaaaggagaaaaaaaaaaaggtttcttgaaataggaaagaaaacaatgtacaataaatacagtggtggttaggcctgggtttgaatcccagatctctctcctatttgcagtgtgaaagtgagaaaattacttatctcttttagcctttctgtaaacaaggacactaacatactgacaccttagaggtaggttgttgtggggattaaacattactacctataacagacttaaattagtaataagcaatagtaataaacatattagtgttactactactattattattagtgggtggtagtagcagaaacaaacatagagcaacctcaagaagtacagaaagaagcttgttaaatctctgccttgaagagcttgttttcccatctatctatattataatgctgaagtgtatgaaaattttttaaaagtgtaatataccttttgcactcacaaaccacctttttaacagtttatggaggtaaaactgtcatacatgtgcacccatgagaccaccaccacaataaagataattaaacatctccatcagtgcaaaactatcctcatgcctctttataatctatccttcttgctctcatcttgccccaaggcaaccactgagacgttctgtcaatacaaattagtttaaattttctaacattttatatatgtggaagcatacagtatattagttttctaggtttgaaatttattttcacattctggaggctggaagtccagtattgttatggtttggatgtttgtcctctccaaaccttatgttgaaaactgatccccaacattggaagtggggcctaatgggaggttttgagtcatggagacaaatcactcatgaatagattgatgcccttcctcagggttgagtgagttctcactctattcactgctgcaaaaaccgattattaaaaaggaccaggcacctctctctctccctcttgtgtcctctttcaccatgtaatctctgcacatgctgattccacttcaccttctaccatgagtggaagtagcctgaagccctcactagaggcccaatcttgaaccttccagccagcagaactgggaattaaataaacctcttttatttataaattaaccagccccaagtattcctttatagcaatacaaaatggaataagacagaaaattggtactgagaattggggtgttgctataaagatacctgaaaatgtggaagcagttttggaactgggcgatgagtggaggttggaagtgtgtggaaggctcagaaaaagacaataatatgagagagtgtctggaaaaagtgcccaaaggcacttcagaaatatttggggccaccccttccctaataggccccaaggccttctggggacagacctggagcaccactgcccttggccacctcaggatgctgctccccacatcctggctgctctggctccagcagtgggtcaaatggccccaggtagggtttgggccactgctcctgaggggctaagtggtaagccttggtggcattcatgtggtgttaagtctgcaggcatccagaatgcaagggacatggaggcttggcagctttaacctaaatttcagagaatatattaaaaagcctgggaaagcaggcagatgcctattgcaggagtggagccaccaaagagagcccctaccaaggcaatctttagtggaaatgttgggttggagtttccttagagtccccaccagggcaactcttagtggacccacaaaggtgctggaaccccacaatagtagagctatccacagcattccacctcagcctgaaaaagctgcagcattattacaacccatggaagcagccagtggtctacgcccagcaaagctatgggggaagggctactcaaggccttgggagcccaccccacacaccactgtgaccaatatgtaggagatagagtcaaaggagattattttggagctttaagatttaaagtgtgccctgctgtgttttggacttgcatggggcctattatccctttcttttgaccaatttttcctttttggaatggaaacatttacccagtgcctgtaccaccattgtaccttggaggtaaataatctcttttttgattttacaggcttacaactggaaagaacttactttgagtctcagatgtgactttgaacttttaagttggtgctgaaacaagttgacttttagggactattgggaaggaataattgtattttgcaatgtggtaagaacataagttttaaagggccgggggcaaaatgctatgatttagatgtttggcccttctaaacctcatgttgaaacttgattcccaatgttggaagtggagcctaatgggaggtgtttgagtcacaagggcacatccctcattaatagattaatggcaggagtgagctctcactctattcgttctgcaagagcctggtacctccccatttctctcctgcttcctctctcaccatgtgatctctgcatatgctggttttacttcactttccaccatgagtggaagcagcccatagccctcaccagatgcccactcttgaaccttccggtctgcagaactatgagctaactaaatccctttccttcataaattattcctctatagcaacacaaagaaactaagacaaagatcaaggtggcagcaggcttggtttttcctgaggcctctctccttggcctgccaatggctgccttcttgctgtgtcttcacatggacctttctctgtgcctttgaatccctgatgtctcttgtgtgtcccaatttcttctttatataaggacatctgatggattggattgggcacactctaagaacctcattttatattaattactactttaaaggccctatctccaaatcaggtcacattctgaggtacaaagggttggaacttcaacatacaaattttgggagaatttaatttggctcataacacacagtatatactcttttgactggcttatttcactgagtaaaattattttaagattcattcatgttgttcaatgcattgttagtcattttttattgcctagttgcattctattatgtagacataccacaatttgtttattcactcttccgttgatgggcatttgcactgtttccagtttttggctattataagtaaatctgatatgaacattagtatataagtctttatgcagacatatgctttaatttctcttaggtaaaacatatgaatagaactgctaaatcatatggtaggtacatgtttaactttattagaaacaaattccatttcattgcagtgagtgtaaaatggtatctcattatggttttaatttgcattttcctaatgatttacaatggtgaatatcatttcatgcatttatttgccatccttatatcttccctgagaagtgtctgctcaaattttttgctcatttagtgttgggttatttgtcctcttcttgatttgtagtaattatagattataaatataagtttttgtgagataaatgttttgcctgtatttttcttctagcctgttgctttcctttttggttttataataatatgctttgaagagcagggttttttttttaatttgatgaagtccaatttattttttttcttttacaatttgagggttttgtgtcctatttaggaaaaatttgccaaagccaagggcagtaacgttttctcctagggtttctttcagaagttttatgtttttaactctaatgataggtctataatctattttgagttaatttttatataagttgtgaggtaagaatcaaagttcatttttggtacatgaatatgcaactgtccagatgatttgttgaaagattatcccttccttattgtcttgcattaaatttagatattatcatcttctctgttcttctcacatgatcatacagaacactcaatgagaaatatataagcatgctctgaaaagtgagaagctaacagaaacctaagtcactaccttgattagttctgaataggtccctgatagataagtaacagaaaaaatattaggccaggagttggggaacctctgtgactcgctcttttattagccttcaaactgctttgtaagttgtgaaatggtaaagaaatggaagatattgtctttatacctaaaaattcctatactacataataaaggccattcttgcttggcatgatggtacagggccataaatatgaccatgcaagttgaaaccatgcgaaaggacctttgttgttgttgttgttgttgagacggagtcttgctctgtcgcccggggctggagtgcagtggcgctatctcagctcggctcactgcaagctccgcctcctgagttcacgccattctcctgcctcagcctcctgagtagctgggactacaggggcctccaccacgcccagctaatttttttgtatttttagtagagacagggtttcaccgtgttagccaggatggtcttgatctcctgacctcctgatctgcccgcctcagcctcccaaagtgctgggattacaggcatgagccaccgcgcccagtcacaaaaggatcttagtaattaataggaaatattattcttgtttcatggctcttaacattttttgtgaaatcattaaaaactcacttattgctggctatacatatatagagaagcaaaaaatagcaagactaatatttatttagaacattgtaatttaaaacattagaaatattgggaattaaagcatttaatttgttaaaaaaaaaaacaaaaaaacaaaacttacccagagtagtttgaacagtgtttgcctcttctttttgttgtataacttacaatacagagtgagcattttttctatgtctaggctaacttccaagtctggatcagtttccaccttttatccttggcacttatattgttgtgaaatagctccaaagtttctttaatgtcaagttttctaccatcattgcttcccctaggttgcctttatccttttcctcacaagcactttggtcattcatgtcggtaagttccccttccacaggtgccttaggctgcagctctagggtcttttgagcagtagcagtgtcagcatgtccctggtcagctagttcttctataactccattcaaatttcatttccaacattatcactttttatccctttattgcagtttcatctctctcagccaaatctctctcttgattatacattttggtaaaaggtcataggggtttaccattgagagacaaggagacaatacaatcacatgctttgctgtgtgtgaactgaataagaggctcacagttacctatcactgacatattttgaaagaagtaacatttattagtcactggtcatgatgcacatctgttatttacatagggacttgtggactaaagtgccagcaaagatgcttactactttaggcaattacttgcagtgaatatattgtggtaactaaaatgtgaattgtactgtgggactggtgttatttagctaaacacagtaactgatatttgagcatattggggccatgcaaagtgaaggttccctatatttgcagtgttcaaaggtgtgtgaattcatctatttagtgttctcagcatttgaagacgacaaataaattacttctttagctttcttaatatgagtcttcaggaaccttttctataaagtcaagaaatgtgtgattaaaaaaaccacagagctttctatgatggccacttaagttggctgagtttcagattagattacactgcgttatgaggtagatataccaatgggcctttaaaaagaatatggttgaattatagtttcttttcttttatgaaaagccaaaagttttacataacttcccttactttaatgatttaacattatttttattatctttgaatttcttagttgtaactcttttgatatccagaataaaaacttcaagtcagatcaaatattatgtgtaccttctattgtaaaatgagcttcttacaatcccgagaggctaatttttaaggcatgtttgcttttagtctccttgagggcaaactgcacatgcagaaatagaaattataaaatttggacctttgacattttggagaagcaacaaattattagtattatttattaaaatgtctaatcatggttcattattctgatttcagaagtattcatcaatgcacttctccacactctccccacagaagataacagaatagcttattttaaccatgttggatatgtacttgttttttatcatcataaagttagtttcaattctaataaaccaactaaacatgaaggtatttatctagtgaccgcagtcactgtgttccactctggtttttataataactatctcaagtctagtaggagaaacaaaagtgaaaataattaaaatatggtttggtagaaggggagagtggttacaagatgctgtgagactactggaaaaacaccaaacctagctttgaggaaaataagaaaagcctattggagctggttaagaaagatagcaggaactgcctcagcaaagaagggatgagtagttctttcaagaactgcaggttaagaggcataaaaaccaacaaataagaaaagaattatgaattctagataccaaaagaagttttgtgggagagctaaggctagagaggcaaacaggtgaaattcttaggccatgttaaacaactgtaccatgatagtaacaaagagccaagaaagagctttaaaagaagagctacatgttctgacttgcattttaagaaaatctcagtagcttttgtgaatgatcagaaagggaggcagtaaagaagaacgtaaccagctgagaggtaaaatgggctcagtctaagtcagcagcagtgggaactgagagatgggggaggaccccagaggtattatggaggtagaatcaactgactccctgttttctggtttgaacttggtgattacataagatatagaatataagaagagggtcaagttggaggaagtaaaatagtaaatttagttttgaaaaactttgactttgaaaggaatgtgagttatggaatgagatatcctgcctaagattaaaattgcattgctgtgttttgattctgctctttgaatggcctgagatggataactcctaagagtaactgagtgaggaggacagaaggtgccactaccctcccatccaacacagggaagcaacgttaaggctctgtggagacaatcaaaaggcagcctcctgttggagagcagattagcagctttattgtccaggatgaaggatgcaaatagctcttttttcgcgtgtctaaacaaaatagccagagaaggtggttaaggcttcgggtaccaaaagtggtgtatgactcagactattggattttatgttttggaaggctcatgctctgagaagcagcaatatatgagaacaaggctgaaggactgctgtaaaggaccctgtaacagtggctgaaggatgtaccagaaaacagaggacctgactctctcatatctagcacatatcttagaatatgcccagatcacccagtgctatgtaccagaaccctttatcatggtcacaggccaaaatgtctcatacaaaaagccatacagtgccctttgcactttttctaaatataaacaggaaaataatcaaaactatttttagcttacatggaagaatatctcggtatctgtttttttctctgttgcttggttgattcccagagttgaactcaccaggcagattcttaagttctaaagcctttaaaaggttaaaaatgaataaataaataaataataaattgtgtatttactataaccaataaaaaagaaaaaaatatgcctttgtttagtgctcatgatccttaaatccctatatgacatgacctgctatttaatgtgttgtatgataagtgaagctagatcctcatttaaaaagtgctatataaaatatctcaagtttcacatgccaatcaatgagttggttaataagaaaatgttaaactttctggagatactttccacttgaacttcattttcttcttctttcataaaaaaggaaatacaagctattcatttctcagaacctacccacagatctatcattttataaataaaaataacaacataacaacaacaaaaacatataaacaaaaaatatatacaaacagtctcacaatttacccttcccctttgaagaaattatagttaggaccctaagaatccttcctttcaaaaaatttctttaccaagtgtgaattcaacaaacacttattacacatttagtaggtacctggccctgtttcagacactggaatacagggatgaattggataatggcctcatccttaaggagtgaagagagtagttagaggacatgtaatcaaataccatgtgaccaatgtacggagacagtagtataaatgacagcactagattgcacctaaaagtcaagaagaaaagctcctcaaagggaaatagcccttgaactgggccttagtgagtcactggaagttagcatatgaaaaacagtgtgtatttagaaggaaagaggagagaaggtgaaggggtggaaataatggaggcatacatgtccctttgggaaactgtgactaatatggtaataagagcacaaagcacatgatctagtccaacaacagactaaaactataaaatatcttgtttcatatataaatgaaattaggaggtagctagtcatactttattagaatatttgtggagaaagcctgaaaatctatacattttcaaagctcttgggtaactcttgtgtagccaacctagcaaccgctgccatggggaacaaggagcctgtgaaggttttaagtagtacaataaaatgatcaagtctttctgaaaatcaattttaaaattaatctggaaaaaattctgtaggaagaatgagaaaaaattcatttatgaatgaataatgatggcagatgagtctcattagatgttaaaagataatatgaagctatgctaattaacagaacaataccaataaaggaataagaaaatcagtagaaaaagtccaagaataaattaaaatatatgtaaggctctagtatatgataaaagtggcattttacctcactcaagagaaattccaggagagtcttgggacaactggatagttatataatgctgagtccctatcaaacatcttataccaaattaaattctagctgcatcaaagatttaaatgcttaaaaatcataaaggtactagaaaaaaacatgaagtaattattacaatcctagagtaaaagaagcattcctaaagagcacagaaagccccaaacccagaagccccaaaagcaaagattgccatatttgaccactaaaaatcagctatttcttcacggtaaataggcatgtgtgtgcacatgcatgtgcacctgtgtgtaacacaaacaacagcagaaaaaatactacgtgtaagacacacaaaggcataattttttccttaaagagttagtaatcggccaggcgcggtggctcacgcctgtaatcccagcactttgggaggccaaggtgggctgatcaccttaggtcaggagtttgagagcagccctggccaacatggtgaaaccctgtctctactaaaaatacaaaaattagccaggtatggtggcaggcacctgtaatcccagctactcgggaggctgaggcaggagaatcgcttgaacctgggaggcggaggttgcagtgagccaagatcgcaccactgcactccagcctgggggacaagagcaagactcatctaaaaaaaaaaaaagagtaaccaataagaaaaaaaaaaaaaaggaaaatggggcaaagaattgaaactagcagttcactgaaaatataaaaggcttaaaaacatatggaaagatattcttttgttctcaaataaataccaattaagtaatcaataagaaataatttgtcatttaagagatgagaaaagatccaaaaaattgatagcccaaaatattaatattgtctttctaggaatttgttcaaaaaatatttaaatatatgcatacagtatatgaagagagatgaccgctgttcataatagcaaagactagaacaacctaaatgtccaaatgttccatggtagttaattatatggataagtaccctaatttcagaaattaaatattaaataaattaaggtacttatccatataattaccatgcaacacttaaaaaaatgagatactgctatacatgctgataatatacttggaaattgtatctaggaggaaaacaaatttaaggatgtaaagtgcattccgacaaatttttttaaaagtttgcatgacaaaatgacaaaatgaatagtgtaaaggggccctagaaagtcttgagagaaagagagagactttctattttatatccttttatgctatttggctttttttttaaccacgtacatctattactttaaaatatatataatatttaaaagtaaaaacaatgtactagaaccaaataaagaaagaaaagaaaagaaaccctctggcaatgatataaaaaaagaaatcacatatagactttcgttaagaaaatatttaccataaattcctgcatgatatcatacgctgctgttttttcctcaaggattttcaaacaatccttgatggctgtctgctcatgaaaattgaatattaatggccgaatctgagccaactgatctagttctccttcagaaacaattttgcgcgtatctaaggaagagaaaaattcacatatgtaagttactggtatatatgtgaagggagattttatttttgtttctgtttctcttaaagacacagccatttaagggtaaacagaagtttatttttccacgggtgaagagtctactactttgaaagaggcttcctttggaaaaatcatggctatttacaccttgaaattatacaaaatccactgcccttggagaaaactgttcagtgccataaacataacgaatgctgtggattgagaagtgttcagttttataatgtgaattgggtatatggattgaaaattatgccaaggcaagaacgtccaaggcttggattaggaaagagaacttttgccctccctgggaccaagtgtttggaagttcctagagtctgagatgtggtgacgtggagagttcacgtcctgtttcattactctgaaacagattgaacatgaacgcacacacgtgcacacacaccaaggatggagaggatctatgcaatataattaataagatggaataatggatacgtatggacacttgcaaccaataattggggagaacattctattaatatttaatagcacacatacaatctttttatttttaattatgatcttttaggtaatgttgacagtcaaggttccaaacatctgaaattttatacattatgtccactggccaaaatgcaataaatctagaagtcaacagtaaaagagtattttaaaagcttcaaaattttgaggtaagatgttcaagtaaaacaagttctcataatctctttgcaaagccaaataatgtgaacaataatcaagttaataccagcaaaaagatatatacaaaacaatatagcaaaagaaagaggtggaaatttctaagaatctgcacattcctgggaagcacatcttatcttggtactccactatatccagaggctctttgtagggttggaagtgagggctcttggttgggatagacaggcacagaaatcctaaaatttctcacaaatatccctaaccttagtatgagaggaggtctaagcaggctggaaggggagataaaattcccacaagcgtagaagccattttgatcatctttgatgcccaacagaaaaacccttagatcttcccattgtgttccacctttgctagtacaaaagctgggagaatgaagagagaaaaaaatgaaaatgtagaatgactgtaacaaacactggtgttgactccccaacactgattctacccctctggttagttaaagccatttgtgatcattccatagtaagatccttccagtgaataattcagaaataggtaggagatttgcgccaaccatagaaataggctggtcttgtaaaaaagagaagcaaacctctcttctaccctcatccctctgtacagacataaacaaagaagtataaggacctaattatcatagtctgccctcttatggccataaaaggaaagcgtatagcaaatgtgaaaaacataaagaaactatgttcttgatgacattagcaactgatcatattgaacctggaatccttcctatctctgggcttccattatggtagaaaatatatatatctttatcattaacatcattctgaatttggtctctttttcttgtagcctggtccaagaattccaatcaaagtataaaggtgaggtttcagctgtagatcctgggaatcatttcagccagtttacagaaagggatttgatctagctatttggtgttgtatcaccattgtgtgggcttgaagaacagatgcctctctcattatgatccaagaacaacactgcataatggtctgccaagaaaagttctgtctttgccacaattaggaaactgaggaagttggagaccattttttctagccactggctcctagatgacaccacttcagcaacaatggagaaataagaaagtcactaccacaactgttggctctagtaacacatcaccttacctataatgaggaccaggaacgccaagcctgctatgatgcatagcaataaaatggatgcctctctacacatttacatcttggctaagtgcatatgatcggcaaagcccaaataagctaccaggaagtcttgaaaatgtaatttttcatttttctgcctgggccatacaggaaggtacactaggagaagggtgtgactgatattgagtaagggcatctgtgatatctgcttaacatttcagccacaccatgccctttgagtatcctgctccttggcccctatcccttcagcacacttatcattgtcctcgggcaaaataaacaatgcagccctccaaaatacagtttacaagggaagatgatgagatccaaataaaaatggaaatcaggaagaattcattcctgctcaatcaacaaaaccgaagagacagaaaaagctatacatgttcataacaaaatggaataaaatgtgaaacacagaaaaaataataatataatatagcatgcagaataatttttaaaatctattctaaaatggaagataagcttaaaaaggaaaatgaactgtgtatgcaacatctgtcgaaagaaaaagaaaaattattttaaataagagttcacaaggagataagaaaacaatagaatgaggtttaaaaaaattagtttataaacctaagaaaataaaggtaaaactcaaaagtacataattacagcaataatttataattaaatcgaattctgcaagaaacaaagcaggcagttgaaaatcaacttattgccataggacaaaggcatgtatacatacagtaatgaagacaagaaaggtttaaaaacacagtgaaaagataatgcatgtgaggacctcatcagaggctcaggagaaaagctgcagacagggtgaggaacttgagaaatcctccttcgtggggcaagcttgggaaggggaaaaacagcatccacaggaatggcacaaagcatgcccaaaatgcttttccctatttccctaatggaccaaaagcataagaacctgagaaaacgcatgaaactctgtcatcctcaaggcacaaatgaagactcattaacattgggggtagggaagagagaagagcatcctggacccaggccataagatattccctacacctgcagaatggacaaaataataaaggaggtaccgcctgaggccttcctaagactgagactgaacaaggacagcagagaatgtcaccccaaccaggttggcaagcaaggtaatcataagtaagagctctctactgctgggaattagagaagatcatggagaagaccttctctgaggtgcatgtacaatgggaagagctaaagcagagggtggagtaaacactgaggcaaatcctctacatgtaaggtaacactggaggaatttgaagctggtggtgcactaagggtaaccatagcaacatcaaacccaagccctgctgcattactgagtaaattgatgcaactcctcacactgaaggcctaccaacaaaagagtcatgtccatccctatttacctcagcgtctagaacttagctaagaaatactacaatagctcccccttatctgcaggggatatgttccaagacccccagtggatgcatgaaactctggatagtattgaacctgatcgtcatcaactgaaacatatttttgttcatgtcttccacccataaatttaatgccttttccatcttaagtaagcatgtatcatgcactgtggccataactttggcactctgatgtgcaacagcaaaacttggatagaagattcattcttaccataggtctacgcaactttagcatatgatttttttctttccttattaagtcaagaactttcaccttttcatgtaaagaaagcactttacagcttccctttggcatatccaaattgccagcatcactactctttggggccattactaagtaaaataagggttacttgaacacaagcactgtgaggccaaaacagtagatctgataaccaagatgactactagttgactaagagacaggtagcacatagggcatgaatatgctggacaaaggaatgattcactcccaggcaggacagagcaggacagtgtgaggtttcatcacactactcagaacagtgtgcaatttaaaacttattgtttatatctggaattgtccacttaacatttttagtctgtggttgactgcaggtaactgaaactatgaagagtgaaaccatggataagacatttttacttctatctctagactatacaatattcagttttcaaccaaaaaattatagagtacacacagaagtaagaaaaagagaaaaaagttgccaagagacaaagcaatcaacagaaccagacagagatataacatatgttaaaactgtcaagtgatgaatttaaaatagtgataatcaatgtgtgaaaaggcagtgggaaaagtagacaatatacatgaacaaatggagaatttcaatggagagatggaagccataaaaataataaagtggaaatgcttaaagtaaaaaaaatattgtaagaaattaagcatgttattgataagctcatcagtagatttcacagaggcaagaaaagaattcatgaattacaaaatagatcaagaggaattatccgaattagaacacagagaaaaaaggtagatgaggggcagaggcagagaagaagagaccatccaagaactacaaaccaatatcaaacagactaatatattatacctgtaaatggaatcccaaaatagaagagaaggagaattgggcagaagaaatatttgaaaagataataactgagaattttttccaaaatgaatgaaagacaccaagcctcagatccaaaagctcatcaaaaacaatataagccagaagacaattgagtgacaactttaatgtaatcaaagaaaaaatcaaaataaagaaattaagatttcagtaaatacatgactaattataaaagctagtattcttgtaacaataatgtgtaacttcactttttcttttctacatgatttaagagatgactttttcctaaatttattagcctaaaaataaaaaaattatcataactttagattgtaaatcaacattttgttttctacatgagaaactaaagcattaaaaacattattttatgttttggaacacataatatataaaaatgtaattttgtgacaacaaatgaaagagatggggtcaaaactgtcaaaggtccacagtttttttttttttgtattttactgaattaggctggcataaattcaaattagagtgataagtttaggatgttaaatataatgcccatggtaaccacaaagaaaatagctaaaaacaatacataaaggaaattttttaagaatttaaatatttcattacaaaaggcaactaaatacaaaaggagacagtaaggcaaaaaaaaatgaggaacaaaaaagctacaagaaatatttttttaaaatagcaaaatgacagaagtctctccttatcagcaattactttagatataaatgaattaaactcaccaattgaaagaaagattggcagaatggattaaaaaataaaaacatgatccaactatacactgtctacaaaggactcactttagatccaaagacacgaataggttaaaagtaaaagaaatattccatgcaaacaggaaccaaaacagagcatgaatagctatattaatatcagataaaatcgattttaattttaaaaagttaaaaatgacaaagaaggacattatatatcataaaaggttcaatacagcaagaacatataacagttataaacatttacacgcctagtaacaatcaaaatacacaaagcaaaaattggcagaaatgaagagagaaacagttttacaataataattgaagatttcaatatcccattttcattagtggatagaacaattagacagaagtaagaaaagggaggacttgaacaatataataaacaaagtatatctaacagatacatacagaatcctctgtgcaacaacagaccacatatttaagaacacatggaatattttgcatgtgttaggctataaactaagtatcagtcaattttaaaacactggtatcacaaagagtatcttctcaaaatacaagagataaagttagaaatcaaatataagaaaaactgataaacttacagatttgtgaaaattgaacgacataattttaaaacaccaatggatcaaagaaggaattacaagggaaattagaaacatttagaaatgagtgaaaacataacacaacatatcaaaactatgggacacagcaaaagcagggttaaggggaaatttatagctataaatgcttacatgaaagaaacaaggcctcgaataaacaaactagctttacaacgtaaggaattacaaaaagaagaacaaactaaacctaaagctaacaaaaggaagaaaatagtaaagattagagcagagatcaaaatataaaatataaaaaagagaaaaatcaatgaaaccaaaagcaagttcttcaaaaatatcaacaaaatgatgtgatgaacctttaattagataaactaagataaaaagagaaaagactcaaactactaaaatcagaaataaaaatgaggacattactaccaattctaaagaaataaaaaagattataagggagtactatgagcaattgtatgcagaaaaactggataacctcaatgaaatagacaaatttatagaaacacaaaacctaccaaaaccaaaccacaaagaaacagaaaatctgaacagacctatgactagtaaggtgattgaataagttatcaaaactatcccaaaaaagtaagccctggatccaatgccttcactgttaaattctatcaaacatttaaaggagaactaacaccaatacttgtcaaactgtttaaaaaaattaaagagtagggaacactccctaacttaatctatgaggccagcattatcccaatatcaaagccagacaattatcctacatgaaaagaaaactaaaggccaatatccatcttaaacattgatgtaaaaatcctcaacaaaatagtagcaaagcaaatatttagcggcatattaaaaagatcatacaccatgactatgtgggatttattactggaatgcaaagatgacttaacatacaaaaatcaaggtaatacaatacgctaacagaaaaaaaggcatgcttatctcagttgatgcagagagagtatttgacaaaattcaacatcctttcaagaatatattctttttgagacagagtttcactgttgcgcaggctgaagtacagtggtgtgatcccagatcactgcaacctctgcctcctgggttcaagtgactctcctgctctgcctcagcctcagcctcccaagtagctgggattacaggcaactgctaccacgtctggctaatttttgtactttttctttagtagagacatgttgcctagggtggtcgtgaactccccaacctcaggtgatctgcctgccttggcctcccaaagtgctgagattactggcatgagccaccatgcctggcctatttgtttgtagaaaaaaaattcaacaaactaggaacataagaaaaatacataaacataataaaagttatgtatggaaaacccacagcaaatatactcaatgttgaaagagtaaaagcttttcccctaagatcagaaacaaggcacggatgccacttttgccacttctatttgacataatattggaagtcctagtcagagaaattaggaaaaaaaagaaataaaagccatccaaactggggaaagcaaaaagtaaacatctctgtttgccaatgatatgatattatatgtagaaaatcctaaagattactggattttacacacacatattcacacacacacagagttaaaaaaaataaattcagtaaagtagcaggatacaaagtcacacacaaaaatcagttgcatttatatacactcagatgaacaatctgaaaatgaaattaagaaaacaatttcatttacaataatatataaaaagaaataaaatactttgaaattaacttagccaagaaggggaagggaaagatttgtacaaagagacctataaaacattgctgaaaaaagaattaaacaaatatatctcatgttcatggtttggaagatttaatatcattaagatatcagtactacccaaaacgatctacagattcaatgtaatccttatcaaaatcccaatgactccttctgcagaaatagaaaaactcatcctaaaattcatatggaatttcaaaggaccccaaatagctaaaacaatcctgaaaaatatggggaaaaaagactcacacttcttgatttcaaaacttactacaatactacagtaatcaaaacagtctggtacaggcatagacagacatataggccaaaggaatagaagaaagagtccagaaataaaacccaaattattttcaaaaaagttatcaaggccatttaatgggaaaaacacagtctttacaacaaatggtgctgggaagctggatatccacatgcaaaataataaaattggatctttaccgaacgccatatacaaaaattaacttgaaatggatccattacctaaatgtaaaagctaaaactataaaactcttacaagaaagcatggcaataacttcaagacattggatctggcaatgattccaaaggtacaaacaaattttaaaaaatataattaataatactgaaatatacacttaaaatggataagatagtaaatgttatgttatgtaagatttacaacaataaaaataatttggagaaaatacctctaagtaacccacagatcaaaggggaagtcataagagaaatagggagacattttgttaaaaatgtgtagattgtattttttagaaaagttttacatgaaaaaaaaatgagcacttagaattcccatatatcccctgccaaagtttcacttattattaatgttttacatttggatggtacattcattagtattgaaccaatattgatacatttttgttaactaaagtccatcctgtattttggttttcttagatttccttaatatctttttactgtttcaggagcccatctaggataaaacattacatttagttgtcaagtctccttgggcaacttttggctatgatggcttctcagattttccttgtttttgatgaccttgataggtttgaagagtactggccaggtgtattcttcaatgccttactattgaaatttgtctaattttttctcatgattaagactggggttatgggttttcaggaataagatcacagaggtagagtgccatatttatccatagtatcaagggtatattatatcaacatgatgtatgacagttgatggtgaccttgatcacatggctgcagtagtgtttattaggtttctctactatgcagttattctttgtactcctctggccatactgtactctttgaaagaaagtcaatatgtgcaacccacacttaagaggtgggaaattatgatccacttcctttaaaattgaatattaacgtaatttatcaggaattcttctgcatgggagatttgtctcttcttccccatttattaacatatttaatcatttatttatatcagtatgaactcatggatgatgattttatacttcatactataatccactgctacattagattgttgttcaaattgttccaccttttgctacttagaatgagaaaacattataaattgaatgaaaataaaaacacctcaaaatgtgtgggatgcaactaaagcagtacttacaggaagatttgttgtattaaatacttgtactactgttgtccctctgtatttgcaaggaattggttccaggacctcccacagataccaaaatcctcagatgctcaagtcctttacacaaaatagcatagtatttgcatataatctaagcacaccctctctctcaaatactttaaatcatatctagattacttataatacctaatacaacataaatgccatgtaaatagttgttatatttttaaaatttgtaattttttgttgttgtattgttatctttgttcctaaaatatctttgatccatagttggttgaatttgtagatgcagaatctacagataaggagggccagttgtatttatgaaaaagaaatatatcaataatctaagtttccaccttaataaattaagaaaagataaaataaaatccaaagcaagaaggaaaaaggaaataataaagagcagaaatcaatgaaattgaaatcaatgagaaagtaagggaaactaaaagctagttcttggaaaatatcaatagaattgatacagtctctagccaaactgatcaagaaacacagaacaaagacacattttatgaaattgaaaaaaaagagaggtgatcagttaagataagacatcaaaaagttaatgagggaatattacaaacaactctagtcccataagttagacaatttacatgaatgggacaaattcactgaaaaatacaaactgccaaagctcattaaaaaaaagagagacacctaaatagtcctatatcaattaaataaattgaatattgttatgggctgaattgtggcccatatgtggccgtatttggagacagggtttataaagaggtgattaagttaaaatgaagtcattagaatagcccttaacgtaatataactgatatccttataagaagagattaagacacagatatacacagtgggaagaccatgtgaagacacagaggaaagacggccatctgcaagtcaaggagagaggcctcagaagaaatcaactttgctgacatcttgatgtttgactgctagcccacagaactgtaagatccattcttggatattttgttataaaagcacccccccaaaaaaaaaaaaaactaaaaactaaaaactaacacaaatatgtatttagaaacctcacaaattctgggtccagttggcctcactggtgaattttagcaaacatttaaggaagcaatactaccaattttatacaaacttttccagaatattgaagaggagaaaacacttcccaaataattttataagggaagcattactctgatactaaaaccggaaaaagatatcacaaaaaaagaaaattacagatgaatatctgtcatgaacataaacacaaaaaaagtcttcaggaaaatactagcaaatcaaatcgtaaaacataaaaacaatattacaccatcacaaagttgggcttatcccaggaatgcaaagcaggtgagatatttggaaatcaaccaaagtaactcatggtatatcaacaggcaaaaaaaagaaaaactatatgatgatctgaatagatgcagaaaaagcatttaacaaaagtaagagtccattcataataactccgggaaactaggataataggaaggctcccttaatctgataaatggcattcacaaaaatactacagcgaacattatactttatgatgaaaaacagaatgctttctccctaaaatggagaatctggaaaggatgtccactccctttcctcttattcaacattgaaccaaaagtcctagcgaatgcaataagttagtaagtcaaaaaaaaaaagaaagaaagaaagaaagaaaagaaatgaaaggcatatacattggaaaggtagaaaaataaaactgtgtttattcaccaacatgagtatctacttaaaaaaattccaaaaaatatatttaaaaggccctagaattaatgagcatttaggaaggttgaaggacacattggtaatatacaaaaatcaatcatatttctatctactatcaatgaacaatagaagttaaaatatttttcataagtctcatttacaatagcaccaaaacatgtgaaatattagatataaatctaacaaaacatatatacaatctatatgttaagactgcaaaacaaacaaacactgatgaaagaaatcaatgcagacctaaacagagtgaggaatgcttccgtcaggagaaacaacaacaaatccgttaaagtggaatttgagaacgccaccaggacattttgggttcctcatatgctactgaatcatcagggaaagggggattactacactgcctagtgtgctggattccaagtattaaggggaaactgggctgctgctttccaatggagtaacgaggaatacgtctgcaatgcaggtgatcctctagggtgtgtcaaggtgattaagtaaacagaaaactagaaccacccaatttaggcagaactactaatgacttagatcttgaggaatgaatgtgtgggtcaccctatcagacaaggaaccacaaccaaatgggatgtttgctgagctgaaagagaataccagacaggtgtaagacggcagtgatcaaaaccagatacaaccatgtgaccagctgcataaacagggataaaatattgtgaatttttctttcttttttgatatgcatattttatacatatatatatatcatatttttgttttcttttaaaaatattaaagggaatgtgaatcagttggaaaagaaagaatatcactcaagacaaaaaagagacacttttggagaaggggagagaatgttttcagttgtacacagattagttttatcactgtagatgcaagcataaggttgtccttatttggatattaagtaacatttaaaagggtgtatataggtgccaggctgatacagggtgaactgtgatagctttataatatgttgacatggctaggctggaccacttttcccagaattctgttctctgaatgtttccagctaaaacagggcacaagcgaggttctcatgtcagatctggaaggtgaacatggggcagcagctattctgtgctcagatgcactatggatgatctcctgactcccctcattctatatgtggaaggaagaacttaaaatcacaacagtgccaatcctacctgaatgaatataactggcatgtcattctatctaaatttcaaacaagtttacacaggaatgaacaaaataatttaaaatcaccgatgcagcaaaaacttgcccaaatagctacaaaaatgtattttttaaaaaattagagggaggattttcctttccagatatatttagaataagtagaatcaaaacagaataatataatatgtccacaggaacaaacaagtcagttagtgaaaaaaaatttagagaatacaaaaggatcaaacatttttggaaacttaatatgtgataaaagtatatataaattcatttgggaaatgtggtttacttagtgaatagtgctggtataactgtccagtcatatgaaagaaaatatagttttctatacccctataatatttagcaataaactgcagatagattcgtgatctaagcaaaataagtgaataaaaattctgaagaaaatttaggagaatatttgcatgtttttcctgtaaagaagacctttttaaacattttagaagttaagaatgttcatgaaagtctcccttcttaaggtatagaattgagggttacaatttatagcacatttgtcagacagacaacatgttaagatttccaacatgtgaagagttcctacaaattaataagaaaaacaatgaacaaagtttataaatatgcaaatccaagaagaagttaataaacatatattaagatacttgatcctagctgggcacagtggctcacgcctgtaatcccagcactttgggagaccaagacgggtagatcacaatgtcaggagttcgagaccagcctgaccaacatggggaaacctggactctattaaaaatacaaaaattagccgggcatggtggctaagcttttggaaaggaatctggtattgcccattaaaatataaaacgaacataaactttgacttaactatcttactttagggaatctaaccaaaatcaaagtaccagtacttaggaaatacgtgtaaatatatatattgcagaaaaagtcaactggagaatgggtgaatatattatggtatttccatacaatgaaatattagacaactattaatcctatgtcagaatatgtcttaacctatataataatatagtttaaattttaaaaactatggttgcagggtaattgtagagttgcagagcacacatcaatttttatttaaactttaaacagaaaatctgtttttatatctttgtgtattcttagataaactattatattggttgcctctgaaccaggattcaggatgatgggaggaaattattaactttttctctatatcattctatattgattttcactaaaatattagcatacattaactttataatttaattttttaaaattttggcttttaaaatattttattaaatgttaaataggtacaaaataataattaagtaaaatatctttaagaacaatacatacccaatttaaaacagaacattagcccctgatgctcctgtgtccccttcccagacctcattccttgtcctcctccctcagggaataatcactattctgaattgtactatcattccttttgtttgttttgtttaccctttatgctgttttgcatatttcacaaatttatatagattacattattttgttttaaatcttgacttttttgctaagactgcatctgggtttattcatcttcacattaaacaaaatacaatatctaattcatacatgctggtgttgacagatatctgagttgtttacagttgaagtctattaaaaacaagcctagtatggacattcttgcatatgtcttctggtagaaaaaggaaagagtttctctaagctaaataaccaggaaggaaattgctaggacatatggcatgtgcacactaaaaaaataccaaattattttccaaaatggtttccatcaagccacatactcaccaatatcaactattatcacatttttaaaaatggaaacaatctagtcagtgtaaattattatttcactatgatttaattttcacttccctgattcgaaattaggttggaccactttttcatattttctcttctgtgaaatgtttgttaatgtgttttgcccatttttctatttggttatcttttacttactaatatgcagtttcttatattttctaggcattaatcctttgtgagcatagacctcagtaacagaccctaggaggagcctaaccatagtcctaaactgaaactgaaaaggagggtactaagaaagaaaaaagcagtgtctatctacttttccctaggaactggccttactctaacagctaagaaatggtatttcctgtttgcaaagtaatgtgttcttatttttattttaaaaatatatttatattcaaaattccacttctgcctaaatatagaaagctagtatgagcatcactcctaccctaacaatatacataagttgaaaaaaaaacactaaatcaaaattttattgaacccattagagagctgaggttgcagggcaaccaagtagtctgcaatctaaggaaagacagactctcctaaggagtgacaggacatgaacactggctccctgtggcagttcaagggagaaagagataccaggcactatacaaatgggaaagaagtattcagacataaaatgtaatgcactgctgatagctggatgtgggccagtgtgacagtacagaacagcgtaaagccacagacacaaaaagaacttgcacacattcacagactcaagttcacagacctccaacaggtgctcataagaaagactgagagcagagcaggaaacgggaagaaccattccctcagaagggtaggcttggaggaggggagccactgtcatggtcgaaaatgcgtaaagccccacttagacctatttctcccagaacaaaagccttacactgcaggaggaggagcagcaatccctgctttgtataagtgtatacccactgcagttggaaacagagcaaacaaaatccatctattcctggagaaggtgcagaaaacagtcctaagcccaggatttaatgccattattattacaaaactcctaccactacactaagtgaaggggaggaaaccttctccactgtagacttgccaaaggtgtcaggcagagtctggatgccatgagaaggggtagtatcactaaccaagcctgtcactgaggaccagggacagaggacctgcccaaggctgagaatggaataggacaacaaagaatgacttggccctccctccccaggcacgcaagcaccagtctactgctggaagataggcaggagaaggaaagaaagcccttctaaagcacaggcacacaggggaggcctaaagctgaggacgaaacaggaagagaccaaaaataaaaactccttagcaccccagctgacaccctgcgcacaagctaaatcctaaggaattctaagccaatggttcaccataggtaatgagagcaacacaaaaccaaaacccagctcatgtcctaaatggcctaccagaggaataggcatgactatttctaggcataaattctatttactttagtctctttttttctacacccagtaccaacactcaatcagatatatagacacataatgaagctgcagcagctgcaacaacagaagccagtgtcaaaaagcaaagcaatcacagaaaaaaatatcagcaacaacccatctgtcagagttatccaccagggaattttaaataactatcattaacatgttaagctctatgaaaaatgcaaacaaaacgcattaacaacagagacggaatctgtaagaaggtgtcaaatggaaatgttgtacataaaaaacactgtgtgctttcaatgggttcattagtagacttgacacaaccaagaaaggaatcagtaaacttgaagaaaggttgacagaaattacctaactgaaatacaaagagtaagaagagtaggagaaaagaaaagtaaaaagcaacaaataatgttagtacagcttctttggaatacagtttgtctgttatacacttatgacccagcaatcccactcctagatatttaccttaaagtaatggaaacttatgtttacacaaagtttgtgaatatctgtagtacttttatccataattgccaaaatctggaaacaacccagtgtccttcaactggtgaatggaatactattcaataaaaaagaaattaaatactgataaatgcaatgacacagatgaatatcaaaagaattatgctaagtgaaagaagttggactcaaaaggctacatatttatgattccatttatacaataccttgaaaaagacaaaagtaaagagaatgaaaatagattactggttgctaggcaccggtggtagggtaaagggttaactataaaaaaatacaagagaaatttggggggagatagaaatgtactataccttgattgtgatggtaaaccttggtcaaacctcatagaactgtatgctaaaagggtgaattttactgtatgcctcagtttaattaagcatgttttaattaattaaaaattatgtctcgttttataaaagcatattcttataaactatttttgtaggagatctgcattttaataattgcataaggtgatattttcttaactggatttgacatttttcaaataaagtcattagagaagatgtttccaacatttgatgggatgttggttatggatgacctctaagatcctctccaactccaaggtttttgaggtgtgcatgtgatcccccaagtttacaaacacaaattttataaatatatatatatatatatacacatacacatatatgttaagtatatattcatagttctaattacatttatattatatatacatgtaaatacgtatacacaaaaagttctgaaatattcttcagtattataatttattatatatttgttattttctttttttccactataaacatgtgataatttgtaatccaaaaatgttattattttacttacaaagcatatattgtgcaacaaatttttaaaaaggaaataaggaagcaggttatttttcaaatctataaaatacctagctttaaaaaaatggattttactaaactgacatatttaatactttaaaatacttgaagaaaggacaggaattagccattgtgaatatggggtgtggagcatttttttaattgcatttttttatttttaaaagaaaatcctagaaaaccatattttcccatttttgaagttttccctagctctttctttcatttgtattagaaatatctttgtgcatatctctaaaatagagcctcaacttgctactacaaataggatgatgtcataccagaaagtagaggggagagagcctgtgatggccctgcagcctcctcatcctcactgctccacctgtctcttctgaaggggcctctggctgtccacatgctgggatcactgccactagaaaagaaatgtatatatttgcccatggtttcaaagaatatatacatttgagaaatactttctaatcatcttcattgattatttaattgacattcatttccatttcaattcagccacccactcccattgtcatcacctgaaactggcccacttgtgaaataattcccaaatcccaatatctgatcacaaactccatctcctcctactacttttaccttgcaaactagtcgcctcagatccatccacttatttaccttctcccctcctttacctagactgtgggagggaagtactcgggtcactgggctttctaatatcggcagagagccgtttggaaaataccagcatgtccctggttggtttcctgtaccactcttccatggcagcaaattccaagccaccatcttgttatagtccttattttaatactctctctgacttagtaaaaatgtaacttcttctagaaaatgcaagccagaaaatagaaattctttcaatttattatcttttaaaacatttacttagatgcatcaatgtctttcttattccttgctttctgcctgttcaaaattcctccttccgtgttcttaaccagattccttctgcctcctctaaggtatttttctataacttatttttttttaacatatcgtgaatttctccctatctacaaattctttcatatcataagaatacacaattttctgtatcttaaaaataggaaatgctttaaactctgtctagctactaattgttaacagatttttcaaatcctagcccatacccactttgtttcctttgcaacgtctccatactcaactgactcgctaatgctattaacttggctcttgttgcactttcatttgcaaccctacctagcaaaatcctcctaatttgacttctgcatctaaccttcaatgtttagagaaaattcttcctaaaatacaaacttaattacacctgcccaccaatatcaggataaatcaaggccccttatcagacacaaaagtttaggatattggccaggtggcctctgtctatttttccatcaccatctccactgatttcctacatgcactgtatgctttaaccttagcaaaataagtgcctttttcttttacttctgtaagaaaattcgggtttcttactcttttctccttctaatttttttcttggattactgtaaacatttaattaatctccactgactgccacttccagctatcctcaccttgccaccagcattcctccttctggatggataaatagatagttgcatgaataaaacaaaaagaccctccgtatgcatccttttgattttaacagactgaataaaatgtatactcagcttcacatatatggcattacttccctctccagcccacactgtattttgggctccacctctcatcttctgcagcttcctagcattccacctcacatacaccctacgactcttggcacctaatatttctccccattacccctaagatattttcacaactccttaccctcgctcaaacttctccctcttgcctgaaatgttcttctctttttcacctgctaggtttctatttaattaaatcctaaattcaaccaaaatatcttttcttcaaagaagcttgtgggaaacctccctcatgcatagtcaatcttctgtacccacaatctttggatttttactctaaaataatatttactatgttgtacatcaatttgtcttttatatgtctgtttccctaattaaactgtgaactaaagagcaaaaaatatatagtagtttgtatttgtgtacagtgcttagtgtatcacagaatctcaaaatgtctttggaattactattatttgtttaatgcacttctgaaaattgtacatataaatttcatacaatacgcatacaaaaacacataatataaagaatatacacattcttatacagtgctattccagtgagggtagctaatattactgataaatctctaagaaaatatggcttaacaaaatgtttcctcatttgatgtttttgcttataacacctaaatttgaacattttataagcatgaaaacttgtttctttgttttcctaatggaaatttactgttcttcaggtactttaaattttttaaatatatactaccagaaattcaccatactaataaacctgttgtttataccatataattttctttctgaaaacagattacatttctaataacatttagtgctgtaccgtgagcttcatgctacctcaagtacactgaccacttcaaaagctccaagcatatttgcaaaagctttgacgccatgtaactattgagaggatagagaaatcgaatccttcaagaatacttttcccttatgttaattaccatatttttgagatcataaacatatttctaagaaagctaaatcaagtttataaaaagctatatcttgaaaaattaaacatttcagggccattattcactgtctccatgcagagggctagctatgaatataagtagcataaacagaaaacccactaaataagcatattagttatacctttctgaaggctcttcaaaaacatcctcataatcattatgtgggaaattccgaagagaaagttttaccttctctgaattaactttattttcaaaaacctacagacataagaaaggaaacaaattatagcactggttttagaaaaatatggtttaaaacgtgatttctatagctacttaagaagagcaaaaagatctgcaataatggaattataaccacaatcacatagtataatgtctgctcctagaaaatcacttaattgtatatctccctattaaatatcttccaatctgtcaaaacagtgtagagtactatgtaaacagaagttatttatattgaattgctcaagtgatttttcaaaactaaatttttaaaaagcttcatttgagaaaaaatagatttattacttcagcccagaagagattttcttataagtgtttaccatgttttgtttactgtgaatataaaattcctgccactaaatttatctttactttagtacttgcaccatctaatctactaattctaagtatttctccacattccactgcccaattttgcaccgggcagtggacttcagtcttgataactcgcagtgccagtgccccagccaccacatacacgtttccttccttccttgtctaatactgtcttgccatacttggccttctattttctcaagaacatcttttgaatcagctgatcaaatctcattcacacacagaaataactttgggactattattgaaattaagtaatatgaattttttaatttaaattggaaataagtgatgtatttatatattaagtatcattatccactaatatgatatagctatccagcaaaaagattataaaatattctcaataaagacaatgtataccttttcttagatttactcctaaacaccttaagtggcacaattgtaaatgtaatgtcatagagcagaccttttatttgatacacactgctcaatccacaaaccacatgtttttacatctagtatttttgtgtacattccattctaaatactttaaacttccattatgatttcttctttgactaatgagtttgttagtgtttgcttggtgtatgtttaatttttactttaaaatcacaggaaaatgtccacctaagattccttctcattaaactatgtagctacaatacacgaaatgaaatgagcttcacagaattgaactagttttgaaatcagcactgattggcaaatccctaaaaattaatttcaggataattaaaattgaaatgtagaaagtgtggctccagtgggatggaggaaaagaagtgggacacatgctattacacaacatgatcccacttccctcttacgagacatgcttaaaagtcatttgagtacaattcatttacttagaaaaagtgatatctggaagtcctaacacaatttaaacctgagacatctttcagctcatggttcaaaatcaaatggattatatttattttttaaagaagcagactgttccagatggctgcaattcaaatttaaggctgactaacatatgtctgattgagtgaaaagtgattttgctaacaataccaagaactaacaaggagaaatataataaattatcaagatggcaggacttttggagattgctcacggaatcaaattaatatcaaattttttaaatgttagaaaatgttttctgaggagcctaagttagcttttctgtagtccatgcagcaaggatttatgaggacaaagtgaaaacagtaacacagataggagcctggtttctagtctgtgactcaagagttatatgatcatagacaaatcgcttcagctttcacctctaaaatgagtgctggcataaaaatgtctttaacaggccaggtgtagtggcttatgcctataatcccagcactttgggaggccaagacgggtggatcacctgaggccaggagctcaagaccagcctggccaacgtggtgaaaccccgtctctaccaaaaatccaaaaaataaattagcctgtctcaaaaaaaaaatttctttatgctccaaatctaaccaacttcaagtctatgagtctagacaatttctaggggacagcatcatatctgaaaggacataaaaatggctacagtatcaaattgtttcatgaaacataagaaaagcaagttctaataaaatcaggtaattttcccaacactataaaaaccatccaggaatgttctaagatccttttttatgaaaggaaactttaaagcatatcagaattcaccctagataggccaagctataacttagcaaaaaaacaaacaaacaagcaaaaaaaaacccaaagtaaaaatataaacaaaatcacaaaatgtgctcagttctagaagaagtcaaataagactataagactatataaaggatatacttgggccattctgtgaaggtgctccctttcaaatcgtctctgcttcaaagagaaaaccattctgatcagagaaaagaatcaagagtgagcggagagcccaacacggcactaacagccagagattcccagccaaagatgtgatggtagccttgatgtggccaacttaagtatagcagagaatggacaggagataataatcaagttacaacactgttcttaaaagctgcactcctgcccacctggggtggaggtggcaattgaacaggggaagtggtaggagcagtttttggtctatgtactgactttatctctattactcctgtaacttacaggaaatgaacacaaggccagcatcatcatcgcagttccaaagctccagttgactaggtaagagaaaaaaaaatgcaaagcacccaccagactaaaatgcatttccctttttttgtgctctaaccctagcactatctccacaaatggggtaatgtgttgaagtaagaggttttgtcacagacttttcacagccctctacttttccatagttcggagacacccaatcatgctgtctcaaacaatgaaaaagtccacaatcaatacatctaaaggtgcttcatacttcatgtgacatttattttgtatcttcattagtaacacaaaactagtgcctgtaaaatttccagagtagcattagaaaatgcaattcattagaaactttgcaaaaaattccactctttcaaatccccattttggtcactgtcaacactacagtgacaaaaaattaagaaatcattttggtgagaaccaaatagatacccatttcccagagagcacagtcagcaatttaggtattagccaaaattagtagagatccctctccttttagtcttacctttgatctaggtgtgttttcctgacttgatgaaggcaaagtctccctgaaattcaagtcttctgcttcagagtcatttccctcataatcgtttactgaacaaaggcggggggaaaaactgatcaaatagaaaacactatacagaaggaaaaatggagccttaatgagaaaaaacaagctacatgaggggcattttcatctacttttcctgttttccaaacaccccatctttatctcctatggtaatcatctctttctcccctgctttgaaaaaatcaacatagcaaagctgatccttcttctaggattatcctcagggagttgacttttgagcggttcccttgttcctcattgccatattattcaagaaagtactcttcaagtaaatcctagatatttacaacctgcagaacctatgcattgggatctacagaatacagtcttctgtgtttcagagtctatttcttgaataaagaatactgtgttacaaatgtcgcactgtaacttcttgtattatttataattcataagttagtaatatgttaaattatacagaaaattgttttcggctttgttgaataatgtaatatgaatcatcccaaggaaactctgggtttcttatatgattattcctaattactgtgttaattttactgcacagactctttcagataagaagccaagagaaaattttctctgatctcagtactgagcactcagagtactgtttctcataccatgggagccttaaatattatgatttagaaattctatggcatggcatattaccaaatcaataaaaatatagtaaacaagtactatggaaatgaaaaagtgtgttcctgaatgtgtgttaaaaaggaaatctaatagaaattatgaacctttataacacatgaattaattttataaattaaaacattaagaaatatcaatgaagggacaacatatcaaaactaatgtgaagtagctaaatgagtatttagatagagggaaaatgtataggtttaaatgtgtttacaaaaaaggcagaaaaaaaaagctgctataaatgagttttgtattcaatcatagaagccaaagaaaaactgaggaaacccagagaaactacaaaggagaaaatcataaagaaaaatataataacagaaaataagcctaaagaataatcagcaaaatccaataaactagttctttgaaaaaaaaaacttaaaaatacgcaaccctctttcactacaaatcaatggagagtaagtgcacaaataacattaaaaatgaaaaaggatcgcttctcggccttttggctaagatcaagtgtaaaaatgagaaagggcacagctacagatgcaactctcatttttaaaggtaataagcaaatattatgagaaactttagggaaatctgatgaaatggaaacttttataagagaattataagttatgcaaatttactccagaagatgtagaaagcctaaatagtgtaataaccatttaaaaagtcaaaccaataatcaaaaatatcactcccaagaggaaaaagcatctgggcccaaacaggtttccagatgggattttatcagactttcaatgaaaaaaatctctcatgcaaacggttctgaaaataggaaattccgcaaacctaggaaggagcttcaagtgctagaaaaaaaattaacaggaaaaaaaagtctatgagaattgtaaacaagcaactcatagaaggcgacttacaggccaataatatattcagaaaaagtccagcctcacctgacaaacaaaaaatgaaaagtaaaacaacctacaattgactttcatttatgcttatgagagatttactgtaataggacttaaccacaaccaaccagaaaataggacaaaatatataaaacaataattttcagaccttaaacaacagactgtgatcccagagagaagggggtgagccttctggttgctccagattatggcctccagaagtttgcaggctatagctcaggaaaggaatcaacgagtccagtgattcaatgagttgagaagaaaaagatcaaagttaggagaggctgaggcagccagaatttgtagggcagagtaccagggaggagggagctatacagaacaagagaagtctaagtagctgcaaagaaaccctctcatgtcctttgcagaatatggatatgcttatatgaaggaggacaatctctgacactcaggaaggaccaccggaaagtagcaagccacacaattcctaggaacagttcataggagccagaatgaggagaccctgtaatacagggggcgttgaggatagtgcacagaagagatacctcttagtactaaaactatccttggaacagaagctccttagggccacctataaaaaaggtgaagagcaagcctcagacaggatcaggttaaacttcaagtaacataactacaaggcagaaaaacccaacattctttaaagaaaaatcaaggccgggtgtggtggctcacgcctgtaatcccagcactttgggaggctgaagagggtggatcacgaggtcaggagttcgagatcagcctgacaaacatggtgaaaccccatctctactaaaaatacaaaaattagctgggcatggtggtgcgcacctgcaatcccagctactcaggaggctgaggcaggagaatcacttgaacccaggaggcagaaggttgcagtgagccaagattgcaccactgcactccagcctatgagacagagtgagactctgtctaagaaaaaaaaaaaaaaaagaaaagaaaaagaaaaaagaagaaaaaaagaaaagaaaaagaaaaaatccagcaccaaaatcatataattcacaatgtgtagtaaacaattaacaggtatgccaaggaatagaaaagtataacccacagccaaatcaatcaatcaatagaaatgtacttagaaatgacagatgataaaatttagaaaaaagaacttttaactattataaatttttaaaaggtgctcaaggaaataaagaaaaacatgatacaataaaaagagatataaatcatgtaaaaataagacctactgaaatttctagagacaatgtatgaactaaaataaattaacagcagataaggcagaaggaaaaaaaatcagtgtctgtcaacatacagcaagagtatatccaaaatgaagcgcacagtagcgaaaaaaagagactgaacagactcagcaaactgggacaacatcaagtgaactaaaattcctgtaactggaatgccaaaacaaatatgaagaaataatagctgaagtgttaccaaactagatgaaaactataaaccaacagaccaaagaaggtcaataaaatacaaatgtaatatatgagcttatagaaaaatcacattcatgtatgtcatattcaaattactgaaaagaaaaaatgccagagaaaacagacacattaaatatagaaaaacaaagataagaatgatggatttctcatcagaaatcatgcatgctagaagataatggtgagacattttaaagtattgaaagaacatagaattcttatagaatgtcaatatagaattctataccctgaaaatatatatttcaaaaaataagacttctgtagaccaataaaaactaagattatatccagcctgcactaaacaacaacaacaaaagttaaaggaagtttttcaggcacaaggaaaaggataaaatatgaaaatgtagaactatccaaaggaatgaagagtggcaaaactggaaaatacatgagcacataaaacatactctttcacatgttctaatttctttaaaagataactcaattataaggaaaaataataatctattgtagggtatacaacactcacaataaaattggtatcaataatagcatgaaaggcaaatgggaggaaatggaagtatcttatgttcctacaactatatgtgaaatggtaaagcagttcccgcttacccacagggaatgcctagttccaagacccccagtggatgccgaaaacttaggatagtacttcctgcactgaagtcttaaatccctcaaagtcatccatgagggttaaaatcagtttttcccaaactcccattaatgttgacattttgacctcctcccataaaccacaaatgttcttaatggcgtctagaatggggagttatttccaaaaggttttcaatttactttgcccagagccatcagaagaatcactatctatggcagctacagccttacaaaatgtttcttaaataatgagacatgaaactcaaaattactcattgatttctaggctatggaatagatactaaatcaggaactaactcagtaatttaaaaaaacctaccaatcagaaagagcccgggccagaaggattcacagtcaaattctaccagatgtataaacaagaggtggtaccaatcctactgaaactatttcaaataattaggaagagggactcctccctatctcattccataaggccagcatcgttctgataccaaaacctggcagaacacatggtctaatatccagaacttataatgaacttataaatgaacaagcaagaatcaaacaaccccgttaaaaaatgggcaaaggacatgaacagacacttttcaaaaggagacatacacatagccaagaagcatatgaaaaaatgctcaatatcactaatcatcagagaaatgcaaatgaaaaccacaatgagataccatcttacacaagccagaaaggctattattaaaaagtaaaaattaaaaaaaaaatgtttgtgaggttacagagaaaagggaacacttatacactgctgatgggaatttaagttcaaccactgtggaatgtggtttggagatttctcaatgaacataaaacagaactaccatttgattcagcaatcacatcactggctatatgaagggatataaattgttccgtcataaagacatatgcacatgtatgttcatcacagaacttttcacaatagcaaagacatggaatcaacctacatgcctgtcaacagtggaatggataaagaaaatgtggtgcaaaaacaccatggactattacacaaccataaaaagaatgaaatcatggctgggtgcggcggctcatgcctgtaatcccagcagtttgggaggccaaggcggatgaattacctgaggtcaggagtttgagaccagcctggccaacatgatgaaaccctgtctctactaaaaatacaaaaattagccgggcatggtggcacacgcctgtaatcccagctactcgggaggctgaggcagaagaattgcttgagcctgggagatggaggttgcagtgagccgagatcgtgccactgcactccacctggctgacagagcgagactctgtctcaaacaaaaacaacaacaacaacaataaaaaaaaaaaacaaaaaacagaatgaaatcatgtcctttgctgcaacatggatgtagctggaggccattatcttaagtgaatcactacctgggtgatgagatcatttgttcaccaaaccacagcaacaagcaatttgcccatgtaacaaaccttcctatgtacccccaagcctaaaataaaagttggaaagaactagtctacaaaaaagtttgggtagctttccatgtttttgcatattctagcttaactgatttatcattaaaattagctttttcataaaagtttgcaactgttaaaggatagtttccagaaaaagaaaatcacagctctcatacagacatataaatgcacatgttactttattatattcattaatcagtgagggaatcaggcagatgttatttttaaatttttttttaaaaaacccataatactgtgtgttagtctgttagcatcactacgtaggaatgtctaaggctgggtaatttataaagaaaagaggtttgttctggctcgtggttctgcaggctgtacaggaagcatggtgctggtatctgcttctagtatctaacctcaggaggcttatagtcatggcaaaaagtgaatgaggagccagcaaatcacatggtgagagacaaagcaagagagaaggggaggttccagactcctttgaacaatcagatctcacatgaactgagagagcactcactcatcaccagggggataacaccaagccattcacgaaggatctgcccctatgatccaacatctcccaccaggttggggattacctttcaacatgattagaagagataaacatccaaactataccatacaggaagtccttgccagagcaattaggcaagagaaacaaacaaaaggcatccagattgaaaagaaggaacaattaggcaacagaaacaaataaaaggtagccaaattgaaaaggaggaagtcaaatttgtccctgtttagagatgacatgctcttacaaatgcaaaaacctgaagaatccaccaaaaaactcttagaactgataaacaaattaagtaaagttgcaggatacaaaatcaacatgcaaaaatcagtagcatttctataaaacaataacaaactacctgaaaaagaaatcaagtaagcaatctcatttacaataactacaaaaaataatacctaggaataaatttaaccagagattaaagatctctagaataagaactataaaaaattgatgaaataaattgaggaagacacaaaccaatggaaagacatctcatgttcatggaataaaagaataaatatttttaaaatgacaatataaccaaagaatctgagagctcaatgcaattcctatcaaaataccaatgacattcttcagagaaattttaaaatcataaaattcatatggaagtacaaaaaatactccaaatagccaaagcaattctgagccaagaaaaacaaaaacaaaataaaaacaaacaaacaacaacaacaaaaaaacaagaacaaagcttggggtattacactacctgacttcaaaatacactacaaatctatagtaaccacaaaatcatgatactggtataaaaacagacacatataccagtggaatagaatagagaacccagaaataattccatatgtttatagccaactcttttatgacaaggcacaaagaacatatattggggacaagaaagtctcttctataaatggtcctggaaaaaactggatattcctatgcagaataaacttagactcctatccctcatcttacacataatctgacttacagatggaatccaggctcacaaaagcagatagcagaatggtggtttccaggggatagaggaaggaggaaatggggagttgttggtcagatggtatcaagtaacagttacacaagatgaatacgttctgaagatctgatgtatagcaaaatacatacaatactgtattgtaatgatatttgctaagagggtagatcttatgtttgtaatacacacatacacacaaagaaagaaaatggtaactgtgaggtggtggatatgttagcttaattgtggtaatcatttcacagtatatagacaaatcaaaacatcaagttgcacaccttatgtatacacaatttttgtcaattatacccgataaggattggaaaaacacttctagggagagagcaataataatgacaaggagggcggatagaagagggaatagaagctgggctgaaggtggaaggaatgagaaaaggcataaaagacatactgaaaaatgatggcaagctactaatgttttaagcaagacaatggcaatatgggtcggctgggagacagctgacatttaactaaaacactgcattagtagatgtatcaaaaaccttagaaatgtatatgccctgagttcacagctaacaaaattatggaaacaaacagctttgtggcagattacaggttgtttttattgtcttgttgttttctttgtgttttggtgcttttttgtacttcccaaattcttcacaataaacctatattacatttataatcaggaaaaaaaaatgccatttgaaaagggtaaagtaaaacactagagtttaattgttgttactctaagcgtgatggcttattagaaatgcagagtcttgccccccaccccaccccaccaagacccagaggatcagaatatgcaggataataatccacaggtggtccctatgcaaatctacagtctgagaggcactcctgtagctcctcctgatcccatacccacaaaagtagatgatgcacctaccaggctctgctctaaagtccctaggtgaagacatgttgttcccatcccctaaatgagactggtaaaaggcttcttcagaaaaggagccttagtgtcctgtgagtcaggccaaaggtctagttagtatcctgggggccagcaaacaatttttgttcacctggtaaaacacacaaagccaaagatttttctgttacacaactggagctatcacagctttgacatattattactcatcaattcaaaatatttaaaactgcaattttaattaaagacaaaataaatttcatttgaaattttatcaaataatttcaggatattccttgagaactggagatacgcttatttattcaaataccagagcttaaatatgctataccttgcattccacaaataaatatgtgaatggcccctccactccaatgatgtatctctttatataaacacacacacacacacacacacacacaaattcaatcaatgtcactcaatggaaactcagttatttaaatgccacacctaagctaaattaggtgctgagaattcagtactgaataaataagaattaattacagagaccgtcttcaaggagttcttgttcattcaatctataaaaagttctcacacagaataaatcttttttcttttctaattcttgccataaagggcctgtaaggccatgttacattgctcccattggttaaaaccaagaatacttttatctggagacctttccattaactacctgcaaataaaatggtattactataatctgaatctaaagttaatgtgtgaaacagatttattttaaaaactttgagatataggtgttaaaaaattatttaagactaggtgtagtggctcatgcctacaatcctagcactttgggaggccaaggcaggaggatcgcttgagctcaggagtttgagaccagctggggcaattgggtgaaaccctgtctctacaaaaattagacgggtgtggtggcacacacctgtggtcccagctacttgaaaagctgaggtaggagaatggcttgagcctgggaggaggatacagtgagccaagatcatgccactgcagtctagcctgggcaacagagccagaccctgtggcagaaaaaataaaattaaattaaattaaaatgtgaaagtaaggcaaaagataagtggaatgtcacttcaatgtcataaaataatgacaggccatcccaaagattacttatgtggggaaattgtactttattcagttcattgtttactactgattaaaagtcctagacttaatgcaattacaacgtaacctatagatttttgtccagcagtgatacaaataatttctgtctgataaggtaacactaaagattataatttatttctgtctggcattaaccaggttttcttaatctaatctagcattcttactctaacattggttcaaaacgccagtgaaaaacctagatcctcaaactgttctttgaactacctttgccatcttcctggtttcttcactaattaatacattgagtaaaatgtttaacctggtttcatttcaaatttgtgagtcacatttataatttttaaaaaactctgctttgacaaggggaagaatatcttttttaaataggaggagggctaggcacagtggctcacacccgtaatcccagcactttgggaggccgaggtgggaagatcacttgagctcaagagttcgaggccagcctgagcaacccagtgagacctcatctctaccaaaaattaaaaaaaagaaaaagatagccaggtgtggtggcactcacctgtagtcccagctacttgggcggctaaggcaggaggatcacttgagcccgcaagatggaggctgcaataagctatgattgtgccactgtactccagcctatgcaacagagcaagactctgtctcaattaaaaacaaaaacaaaaggatggcagtgttcttgtgactggcagtgaggtaacagatttcagtaaggagccttccctggaagcagacatgagatcttaaggacctcagaattaactaagaacctctaagaatgacacctaagcttctgcctaccaactatgttattgaaaagatacaaaatagtacaattttaattaaagacaaaataaattttgtttcgaattttatcaagtaatttcaagacactccttgataactggagacactcttactaattcaaatactagggtttaaacatgctataccttgcattccacaaataaatatgtgaatggtcctttaccccaatgacttatcctctttatataaatacacacacatattattaagacctctccagtgcacagatgaatagactaaaattcatatcaaaccataccaatagtcagttgttcaaaccttccatcagaacagctttgatcagaaatgcatgcctaatcctagtattttaataaacaacagtgcagtgagtcacagataaccctacagaagcacaagaattaaactggataaatttccctttcctggcatgttttctagtatatcttaaaatagacaaaacaaagcaatattaaaatcattaacatttaattcaattttgagttgcagctactgtagtaaaccagtaataagatcatacaagtcaacatcaacacatgtgtactgaaattttaggtagcctagaaaagtaaactatatgataaaaacaaaatcttcatttgcagaagaaaacctttcagaaaatatagtgcaagcttttaccatatttcccacctcccctcaagcttggctaagtaagcccctgcaagtgcttcccctataagctccatgttttataatgatttctggactcatctcctcgggttggaccataagcatcttgaggacagaaactgtaacattttcacttttcaatctccagccactagactaacacaatggagacatggcaagaaatgtttgagggactaattagttaaattccataaagaatgtgtatgtatcaccaggtaactaatctgcatgtccacatcaagaactctgagaagtcacagaggtaccacttgagtgataggcactcggtcccttagggaaagattgtgaaagatattgagggaccagtggtcaggttcgtaagataaaggtttccctccaactcctggggaaggtgcaatagtatagaaaatagagaattagccctgataaaagagaaatccttaaaaaagtattacttattctgtgatagagcactgaggaaagaggaacaaaagctccaatatgaaacaaagtgatcccatctaatcataaataaaagaaaaactacaagtgtttggtttgctcaggaaacaaaagcaaaacacctttcctcaggtggcagggtgacataattggagagtcactgaatactgtacatattctcaaattctcagctgggacactattttcagtctatctcaaactctctcaaaactgaagcaggtgctaacaaagactatttcttcacagtggactttgggttgggtgcaagatgccaaaatagacaatgtaaaatgacatgctcagcaccttgggcctctggcaattcttagcaccagggctacttctaattcttgtgaaagttctatcatacactactccctgagacctatactagcctgaagagaagggaatgaaagaagtctcaaatgttcaatagtgacttactcttgccctacctgtaggcaccccagggatatgagttccttcctctgaaatctgtatttcctgtgactaaattctcagtacaagcttcttagactactagtaattatttggcatgttttatgccttttaataatggctcttagttttctataaggaatggtggtattgctttttctgattataaacataaccattaagaaatgtcattccgtggtttcttaatcaatcattccctgtagtgtgtgagtataggactgggggctcagagggaagcagggagaagtgaagtgctaaagtgctacctccagagccactgacagttctgcccaatgcaatcaggcaaaacaagaaaaataaaataaaaggattcatattgggaaggaagaaggaaaaccatctttacttgcaaggttaaaagctttatacataattacacctcaataaagttgacttttaaaaagccacaaaaagataatgtacttaaattaaaataaaatacagaaactctaggataaagataatatcaagttattaatgcaagtttaaacattaaaaaatagttgctacccactcatcacagacatgagcagcaagctcattaaagattactgtgagcattcattggaataatggaagactcaaggttccaaaggcactgagaccctatatcaacaatgcttcacccttgaaacccagggactgatgatgatacagttgccatgagctacattctgagtaaatactttatcaattattagaacggttcaagtaaaagtaatgaatgacttaagacatctttctgaaatgactcttttatctggatgcctctgctattagggtgcaaggcaaacaaccttctactgtttgtttcattcatgatataaattgctttggcatattccctccaacctcctgaacctcaggtcgatctgtttgtccatttgtctgtttacacttcttttcttccctccttcctacgttcctctccctctcttgtggaagtgtatcagtaattataagagggtgctttatttcagaagacacaattcctgtacctccaatcactgttaccaagcaaaagagttcactgttcaatgtgttagaagccaatactatggcactgggtttttgagaaaagaaagacttttttctaggtcaaccaacaaggagacaggagtctagctcaaatctgtcttcctgtactgtttttaaggcagtatttttattagaaaatgtgtagggagtgaatttggggatagtaggagattggtagaaggaaaggggggtctgaaaaggctttgggcatttgcagtatctcttcatgctatctcatgggtcacatatgtaaattcagggggagttagtacgaaacatgcagtggaaatttgggctgtggcgtcagcaagctcattctgtgtagactctagtttgctgtattggttccaactgatttcagccagttttgttatcttaaaagcagagagaatttcagtgtttcagaaagttgtttttgttttttatttttatgaaccaatcctataaattcaagaatttctctttgccactggttaactctttggggcacagtttcattagtagaccttggcctccatactccaaagaactacttatctactgggtgcagctgaaccatttccataactgagatcatgtaagtcaggaatgtatacacattacacatgtgtgcagacaaaagttcatgacttcacctaccaggtccaagacgagtctccttaggaatgcctgcatacaagcctggcccttggctggtgtctgggaacttggctggtaaaatcattgcctacactaatataaattttttctaaatgagaaaagtagctcacttctcctaaaacatctgttttccttctaggtatctggaatttcagtgactgctatcagtcacactgacagtctgtgctcatgactaacccctgataaaaaccctaaactcttaagctcagacgagcttccctgatagacaacacttcacacaagtttccataccttgttattcagaaaattaagtgcatcctatgtgactccacaaggagaatattctggggagtttgtatctgatatcccttgttgattttgctttctaccttttcagtctaccatatcttagccatgaatgtgactacctgctgaaccccatgaatccttctatccaatcgttgaacctgggagagctctgacaaaggctagcatgggaaaatacgttgtcttcctcattaacagacccttcttagttatatctcactttctaagttcctgccttccacttcctaggagagaaaaaactacacagcattacctgaacatcatcccagggtaatcacagagcagccatctccgcaaaagaaggaaaaatgaactgtgtaatgttgcaatatttttaactgcaaataattttgcatacaaggcttacctacaattgaccatttttgcactaaatgcttttttaaagtaacaagctaatatcttcttaatataaaaatatacatgtccaacaaaatttaacttgttctgctatcatgaaaagaggaattccagacaaatgtctcataatgtgcagtcagtgggcttatataaataaggactaaaattacaagctcaataaaagatcatcaaaccagggaaaactccaagtaaaattataatacacagttgtccctcccacctgagactcacctgagactcatactttccttccaacatgcctgttctgcctattccctcaagactcagacttcaaatgagttccctttaagtagataagaacagtttcgcaacggattccagaaaaaccaatatgccacctaaaggacaaggaaggcatctacactaagaaaatgaaaagaagtcagagagagaacttcctgacttactcagattatatacccatgggtccacatatgcctaaaggccaaccttgtccttaatctttagtcactcaatctataaaataaaagatttagaaaagggctatgggcaatatggatcttttgcaggtacaaaattttttaagtccataaactttctctttaaaacactgaagaccattagtgatggttataatattcttgtctgaactgagagctatagtcaggctccttttagaagccctgccatgaacagagaaaaaagaaaaggcatgttcctactcctctatcctctgtagacatcttctccgtgataagttaataatgagaagagaaaaccaaccttctagctttctcatcatttaatggtttgaaccctgagtttctgcagcctggaaaaaaaaaaaaaaaagaggaagcagcagcagcagcagcagcaagttctcctcatctgaaattcttccctctcctagctcaccttccccaccttctcactcctttgtggtcctcacagtcagatatgaggtaataggtggaaaatacttccctgtgataaggcagtgatgcctgagccacccacttctggtaagaaagctgttcctaaagaatagcaaatggtactcatgttttgggggactctatgctacttagaagcgagtggctaaagttgcacggtgactaattcaagaacaaacagaagaaaaggacaaacagaaaaataaacagaaagaggcatgcccttagcctcaatcaggtagttctaagaaagtgattaggatggttcggagaccaccagccccataccttatccagtcaccaaacaacccaggctggggtgtggttgcctggcaaccacaccttccatgtaccgagtatgtcacaaatatgtctttccggtgtgtgatctcttgactgtgaaaagtaaaacgctaaatcaattcagcaggctttgagtgtctacaatgtgctagtcactgtatcagagatgtggatccagggatgatgcaataacttctgcctccaaggagctcatagtttagtggacatctggcaaagtactcactgattcttgacaattcatataatcatatcaatagatgcaaaaaagcatttgacaaaatccaaattccatccttgatttaaaaaaaaaaaattcttagaaaactaggactagaggcaaactttctcaacttgataaaaaatatctacaaaaaaaatctacagggagaatctagaggctttcccctaagataggtaacaaggcaaggatgttctcttttaccactcctattcaacatcttatacaacttctgactaattcagtaagaaaaggcatacagttgaaaaggaaaaaataaaactgccttgcttctcagatgacataaatgtctatataaaatatctcaaagaataaacaaaaacaattagccacttaatctataaaataaaagatttagaaaagggctatgggcaatatggatcttttgcaggtacaaaattttttaagtccataaactttctccttcaaacaccgaagacctggaacttagctgggcgtggtggctcacacctgtaatcccagcaccttgggaggctgaggcatgcggatcacttgaggtcaggagtttgagaccagcctgaccaagatggtgaagtgccatctctactaaaaatacaaaaaattagccaggcatggtgccgtgcacctgtaatctcagctactcgagaggctgaggcaggagattctcttgaacccgggaggcagtggttgcagtgacctgagatcgcgccactgcactccagcctgggcaacagagcgagactccatctcgaaataaatcaataaataaaaactcctggaacttaataagcaattacagcaaggttgcagaatacaaagttaatatgcaaaagtcaattccttttctataaaccagcaattaacaattggaattggaaatataaaacacagtatcatttacattagctgctccccaaaactgaaatatacaggtataaatataacaaaatatatacaggatctatatgagaaactctaccaaactttgacaaaggaaagcaaatatctaaacaaatggagagatatttcatgttcatgtatagaaacactcaatatttttaagacctcaattcttcccaatatggtttataaagccaatgtaattccaacaaaaataccagcaaattgtttcatgggtatcaacaaattcattctgaagtctatatgaaaacgcagaaaacccaaaataatcaacaaaatactaaagaagaacaaagttggaagacagataatacaagatttcaagacaagaccacaaggtactgttgaaagaatagacaaatagatcaatggaacagaatacagtatccatataaatatatccacacaaatgtagtcaactgatctttagtaaagaagcaaagaaaattcagtgaagaaagaatattctttttcaaaaaatgataatggaacagaccttacacctttcacaaaaaaataactcaaaatgaatcacagacctaaatgtaaaacacaaaaactctcaaacttctagaagataactgtattggtgcccaagagctgctataacatggtaccacaaactaggtggcttaaaagaagggaaaacaaatctggaaattagaagccttaaatcaaggtgtcagcagggctgcactctatctgaaggctctaggggagtatacttccttgtctcttcctgtcttttggtggttgccagaaatccctggacagcacgattcaactgtctcacacaatttaaaccacaacagtcttctctccaatcccccaaaagtcatatccttactgtatgcaaaacacattcaccccatttcaacatctccaggacccttgacccattccagcatcaactctaagtcaaaattgcctctaaatatcaactgtaatgtcccaaatctcatctcctaaatcatctaaatcaagtatgtgtgagatcctgggtatggtccagcctggggcaaagtttctctcctatggacactgaaatccacaaaacaagttatctgcttccaaaatacaacaggcataggacagacagtcaccttccaaaagggagaaactggaaggaaaaagtgggtcacaggtctcaaacaagtccaaaacatggcagggaaattttcattaggtttccagggcctgagagggctgtctggatccatgagtcacacaggtaatcttttcagtgaatggttgttcagccacacccttggtcctgtttcgggagtatgtttcctggattggctgagaactttcaaacccatcaagtgctggttcctttgcttaacaattccttcctcaagttatctctttccttttgcatttcactataagcagcaaggaaaaaccatggccccatctttcacgctttacttagaaatctcctcagctcactgcctacaagttctgctttccacccacaggtaaaacacagttcacccaaatttctgccactctgtaataaggatcacttttcctccagtgtctgataatatattcaccacttcctttctaaggcctcacaagaagcacctttaaagttcacatttctagtaacattctgttcatgacaacatatgtattctctaagatgcaaagaatctatgatagatgctttttctaaaattcccctctctactgagccttcaccagaatcacctttaatatctgtatttctacaaatagtcttttcaaagcagtctaggctttttatgttatgcacctaaaaattattccagtctatacacaattccaaagccacttacatgttttttaggtagttattccaacagaaaaagatttccgggtatcaaaatatgtattcatttcctatggctgccataacaaagtgccacaaattggatggcttaaaaatgcagaaatgtattctctcacagttctgggggcagaagtctgagggtggcagcaaggccatgccctctgttaggccccagggaaggatgtttaattgtctcttcctaacttttggtggtttcagtaatccttgatgttccctggttatagacatcccactccaatttcagcctctgctgttacatgaatttctccctctgtgtccaaatttcccttgttttacagggacaccagtcattgcattaggacctcagcttaacttgtttaacatttgcaaagatcctatttctaagtaaggttggactcacaggtatctggggttaggacttcaaaatattctcttggggtataaaattcaaccacacaacaataataaaagagaaaatctatgtgaccttggttttggcaatgagattttaaatacaacaccaaaaggataatccaggaaacaaagttgataagctggactttattaaaattaaaaacttcttttctgcaaaatacactgttaagagactacaaagacaagctacagaccaggagaaaatgtttgagaaagcacatatctgacagaaaatttctaataaaaaataaacaaagaactcttaaagctcaacaatgagaaaacaaacaacctcatttaaaaattggcaaaataggcatgccactgcaaattccgtgaaacaggagaaaaactgtgagttcccaaagtgtaagagggagaaaaccgacctccaaacacacatccctgctgggaatctgaaaatccagatcacaggagaagaatttaaccttacctagagatggaagggatttagagagtcacacaaaatatgaaagtagaagtagcagcaggaagtgccttgtatgcactcccagtctccagctcgagcatagggacgccatccctgactatatctcactggggcccttgtggaagacaaccagcagaactgcggaagtgttgtggggtgaagaaagctcccagatgaaattggtagtggtttcgactgggcacacattttctggagtggagtccgaggaaggagcaggagctgctgcagatacaagcaagtacaggagtacaagaactgccaccaacagagcaggggcaaggtctgggcggggcattgcaggatatgcgggcttgccaactgcatgggagttgagtcaggcctcttgctactggctatccctgacttccctggcaaactatataatacagtagaggcggccaagatcccctatggaacataaccccattggccggagaaccaacccccagcccccacagtggcctcagcaagccccgcccaaggagcttgcctaaccctgctgcctaaccagacctgcctaaccctgctgccacctgacggcatttccctacctgccctggtagcctaacacaaaacatagaaactctggggagcttcatcccctgaaccctgcccccagcaccctctgctctggagggttgtctttaattgtctatggagcatatatatatatactctttccctatggtatataagccctgagtctggggagtaatggtgtgaacatctacctgtcttacacgaacacatttctgcccaagaacacatttctgtccataagtttcccctaaaaatcaccctctgccaataaactagatatgcctgcctcattctttgatttcttggctccttctgtatttggaggttattttgcatatatggccctttcaaggaatatctatctatataaagataaaacaataagctatcaagctataataagatatggagaaagcttaaatcaatgtttctaaagaaaagaagccaatttgaaaggctgcatactatataattccaactatatgacactaggaaaagcaaaacttttgagacagcaaaaagatcagtggtaagcaggggttcaggggttgagctagaataatgaacagaagaagcacagaagacttttagggcaatgaaactattttatatgatactataattgtggatacatgacattatacatttgtcaaaacccatagaaatgtacaatataactagtgaaccttaatgtaaactacagacttcagttaatactaatctatagatattggcttattaactatagcaaatgtaccaaacaaacacaacatattaataacagggaaaaccatggggctgagggggtatagggtaactttctgtactatctactcaattttttaataaatctaaaactgttctaaaagtagtctgtaaaataagatttttaagagcaaacagaacaagaattttaaaagataattgtctgaagcacaaataatgacaattatatggtgcactttataagatatgtagatgtaaaatgtatggcaatcataacacaaagtatgggtgggaaataatggaagcacactgttgtaaggtatatatattatactatatgtgaaatgatatattatttgaaggtagactgtgacaaacttatacagcctagagtaaccactaagaaaagaataaaaagaaggagaagaagcatggaggagaaaaagcagaagcaacataagggcagagtggagataaaatggagtaaaaaattgagtcattaaagaaagcctcatttaagccaaaagggtatgggaaaagaagggactagattaaagaacaggtaaggcaagtgcaaacctggcaagatgatagattaagatctaatcatatcaataattatattaaatgtaaatggtctggccatccaaattaaaagtcagggattgtctgactggattaaaaaagtgagatccaattatatactgtctacaaggaacccaccgtacatataaagacattgataaactaaaaaaatggaaaaaagataacccatgtaaacactaatcaaaagaaggtagaatggccatattaacatcgacaacatagactttaaaaaatgataaacatttccagaaatgaaaaggggcattacataatacataggaattctaaatgtgtgtgtatccaacaacatagcttccaaagtgataaaatgaaaactgaaatgaaaaaaacagaaaaatctacaacaatgttggagacaagtaggcagataataaggacacagaaaacctgaataacattatgaagcaatttggcctaacttttatagggcatcccagccaacaacaaaataagtattaaagtggacacggaacattcacaaggatagtccatattctgggcctaaaaacaaaccataaaacattaaactgaaatacaaaatatgtttttaaaaatggaattaaaatagaaatcaacagaaataaatctttaaaattctcaaatatttggaaattaaacaatatatttctaaataactcccaattcaaagaagtgacaaaggaaattatacaatattctgaattgaatgaaggtaaaaatacaacatcaaaattagtggatgcagctaaaacagtgctgatagagaaatttatagcattaaatatttatattgggaaataatagaggccttaaatgagtaatctaagttcttaccttaagaaattaaaaaagaaattaaatccaaggcaagcaaaaagagggaaataataaagaggaaaaaaaatcaatgaaatggaaaataaaaaaataacagagaaaaatcaatgaaacccaaaacaggtccatgaaaagattttaaaaaaaattgctaacctctagaccctcaatgtccagtagaactttgtataatgatgaaaacattctatatagcagcaccctccaatgtggaagccacttgggactactgatcacttaaaatgtggccagtgtgactgaggaactcaatttttaatgtaattttattgaaattaatttacatttaaatagacacatgtgactagggataactattgaacagtgcagctctagaattgactactgaaagaaaggaaggggtgggaaggaaagaggaagaggaagagataaaggagggagagaaagagggaggcagagaagatgagatacacaaataaccaaaatcggaaatgaaatgaaaaagaggacttcactacagatcctaatgttagtgccattaaaaggataataagaaagtattacaaacaactgtatgccaaagttgataacatagatgaaaaaaactaattccttgaaagacacaaagtactaaagttcactcaaaaagaactgagtagcatatacaatctgaatagccatatatagttttaaaaacttgagtccatggtataaaactaacacaaggaaactctaggcccagatacctccctgttgacctctaccaaacctttaaggacgaataacaatcctatacaaaatgttccagaaaatagaaaagagaacactccaaactaatttatgagaccaccattaaccttgataccaaaatcaagaatattacagaccaatatctttatacaccaatatccctcatgaatgtatatgcaaaaaaaaccttaacaaaatattatcaagtagaatagatttatttctccatttatttggttttctctcttcaatgttttagagtttttagtattcaaatattacagaacatcattagatttatccctcagtttttcatgtttttgataccattgtaaactgtatttctaagttttaatttccaattgttcattgccagtgctaaatacaattgatttttgtatattggcctcacatcctgtgtctttgccaaagtcatgttatttctagttgcttttttgtagattcctcgggctcctacataaacaatcatgttgtctgcaaataaagacaattttatttcttccttttttatctgtgtacatttatatcttttccttcctttatttcactgactaggacctccctataacgaacagaaattgtgaatggaacatccaatgtgatgctggtataagaatagacatatacctcagcaggaaagaacagagagattagaaataattcacacatagcaacaattgatttaggaggggaaaggtgccaagataatataatggggataggatagtgctttcaacaagtgtgtgggaaaatgagacatccacatacagaattatgaacttcaccccatactcatattatgtacaaaaatccactcaaaatagatgacagacctaaatgcaaactctaaacctataaaacttctagcttaaagcttaggggaaagcttttgtgacactggattacacaaagatttcttaagacactaagcacaaaccacaaaagaaataattgataacttgactttgaaaaaatcaaaagcttctgctcttcagaagacagcattaagaaaatgcaaagtcaagtcccagtctgggagaagatatttgcaaaacacacatctgaggaaggacctatatcctaaatatatagacccttataactcaaaaagaggacgacccaattttaaatagtcaaaagatgtgaacagatacttcaccaaagaagaaacatagatggcaaataaatatatgaaaacatgattaagacaactggtcaacataaaaatgcaaaggaaaaccatacgaaatactgctacatacctactagaaatgctaaaatcaagcacacacacacagtccaatacaaagtgattctggtgaggatgtggagcaaatggaatctcatgcattgctgctgggatctctactcatcatcttgctttatttttcccaaaaccactttttattaccttaaagtttgcttacccatgtaagtccatatatatcttctcacatgtttattgtctatcttccccaatataagtactatgaggctggcaacttggtctgtcctgtcatcactgtgtcattctggcaccaagaacagtgtctggcaatctttacatatttattaaaagtgaggaaggggtggaaagaaaagacactaagacatctataagtgaatatatgaaggcaaggaacccagtcacagccatctacagaggagcgttaagagaaaattaatttagaccaccaggaagctgcatgttgtaatgcatgattcccaatttcagctgcacattagaattagctggagagctttgcaaaatcccaattccaggccacaccagaccaacaaaatctgaatctctgagaatggaacaccagcactggtcatttttttttttttttttttttttttagacggagtcttgctctgttgccacgctggagtgcagtggtgccatcttggctcactacaacccccacctcccagattccagtgattctcctgcctcagcctcccaagtaactggaactacaggtgcatgccaccacgcccagctaatttttgtatttttagtagaaatggggcttcaccatgctggccaggatggtcttgatctcttgacttcgtgatccgcccgcctcagcctcccaaagtgctgggattacaggcgtaagccaccacacccagccaagcactggtaattttaaagttcccaggtgatcccagtgtgcactcaaagttgagaatcactgaaaaaatggaacctagaccttggaaatgtacacaactgagtgtgcaagctacttaacctcccttagcctcaaaattctcatctacaacatgggaaatatatgtacctcccagagttgctgaaatattgagattctatataaggctctcaggaaatgtaaattctcatccccaagggaaacttgatcaaatcttcatagcttagggtaagaaatgctaattctaccagcaattcacatttttcattgttagctgattattttattgaacatttacattgaggaaattcagaaatgctcatttttccactttcctggtggtaagatgctgcctgaagctatgtttaaattttcaagagtaaataaactatggcgggaaatctagctgactatgccagtgaatctcaaacctagctgtacattagaatcatctcagaaatttttttaaagaaacacacgtacgtccagaactcaccaggccaaattaaatcagaatccctggggtggctccagaatatcagtatttttttaaaaagctgatagaaaggtaattgtaaaacacagtcagggcttaaaagcactgatttgtactaacgatatgccatgctaactgcacatcacagtcacttggggagctcttaaaaaagttgattgattccagaaccctaccgagacttactgattcagaatctgtggaagtggagcctgtcattgtgcaaatcttcataaaactccccactggtgattctgatgcaaactcactgagaaccactactttgtatcatacatttactctacgtgttgtatatcagaaagatcatttaaaactttcagtggtctcaaatgccaagcctgccagttacttttaatcagtaactgacacaacacatcacagtaactccaatgactttacagatcttttcagaacacttttatgtccagcccactgacccacatcacctaccctatgctgtgccaaatactggctatgtagtccgttggtatttctaaccaaattcctctaaatgggctgctgatctgggaaaagcaacatggaatcacattactccccaagccttattcccctttgctaagtggtatgtaatgccaggattaatgaaatgaactctattggtcaaatgagtctgaatgaaatctgagttgttgtctgctcctggaagcaaactgttatctatttgtttccctcagagagataaactcagaggaaacaggagtgatccctgaggtgggaataatatagtgggctgcaattttaaaactctgcttagacaataacaggacacttggaatcttattttgatagatcaaaccaatcagtatatacagcaccatggtggtactaccaggcaggtgataatagtagcatttaaacaaccaggcactatattaggcatattaaatatattaactcatgtgattctcaactgcgatgataatagccctatcaggcaggtactattattatttccattttgtcaaaaaagaaacaaaggcacacagaagttagatgatttacccaaagtcccatagctactaagtggcagttttctgaaaccaggcaatctggctttggagtccaacatcttaagtactccactgcaatgcagatgagtgatggccaagcagtttaaaaaaaaagaaaaagttattgtctgcagtagaaactggaggtcagggtatgggtaccttgggcaaattacttaacctcttggagcctatttttgcatctgaaaaatcaggataataattgtacctgccttgtagagctgaggtgatgattaaacaagattaggcatgtgatgtgcttagaaaagtacttggcacttttaagagctttctgtcagccattattattatttgtattttaaaacagctcaagtggtcagggagaaatgaaaatctattaaactgaaaattttcctgccaatcttagatttgtagattctgtagattaccagtacatcagatccaatatgaaatgcagtcataaaagattttcacaaaaacttaaggactgtcactgtgacaaaccccagcccaaacagtccaggacaatggctctaaaaagcaaacatcttcaattatcaagctgtgtacatgtaaacacaacaggaaccagacttctgagtagctgcaaactgcagttctctgtgatgggagaacatgccccagaacagcctgtcaagtggtaattgccagccatcctcagtcacatatgtataaacagaaaagaaaaacaaaacgagggctcaaataaaaagcgttaacattcattaaacgcctgacactctattaaatgtttttcatgcattaccttctttaatcctcacaacacccttccaaagttgaacatgaaacaaccacactggtttatatcactttaaatgtaagactacacgtctcaaatgggccctgagcactgcctgggaatccaactctatttctctagtacgctcactttcaccctctctaggactctgtcacatatctctcctccaagttcccacacctttcctctcccccgctgccctccctctaagctgatggatgcctataccaatagactcttttcccaccacccactgtatctgcacctgttatctcagcttcccctctagttacaacagagtaagtgtccctgctcatttcaaaaccaactactcacctgcttagggtcttctcctttctcaggtattcaacaactaccctttacaatgttcccctctttcatctgcagcagtttttcctttctacgagtttaatcacattgccatataaacattctgctttcttctatcttgaaaaaaactctacccaaccttaaggcccctcttccccattaaagttgttcttgtcaaaatgattaaaatcctcctaattaccaaaggcatcttatacggtaacattcaacatggttgaccactacctccctcccttttttggcttcgcctcctcttctttgtgtacactattaaactagatgtcttcaccagtcccatatattttaaatactatgtacagtatatgatgccgattccaaaggttaactctagcccgacatcctccagaacttcagatttaaatttctaaaaagcacatttgatatctcaacccaaatatctactagataatttatgtgtgtatatttcaccatactaaaaaaaactaccaggtgactgataaatggagagaaggtgaataggtaatgtgaaaaatcaaatgtgctaaatattcatggcacctgtaggtggtaggtggtcagagtcctctgcaaaattcttcccagctatgcttatgtcttctattgggaaaaacctactgggcatctcaaacctaacacattcaaaacataagtactgattccacaacttccaaaaatgaaacctaccccatcctacagttttccttgagtcaaggctagcatatgagggccttggcatatgggggcattgcctatcgcgttcatagatattctgagcttctagaacagcatctggcacacaggaggcgttcaaaatagctgctgaatggattgatgaattcatgttctttctttctaggtccctcgacctccacccgcccttgagtcattgggaagttctgggctgtctcagcgcctgatgatggcttcttaccaatcataccacacggctgctcctcagggagttggtggcattcccctaccacagagccacagggttcctgtcccggtcccgtctcgcataggcgccccaacacgcgtcacagtgcagctggcatcacacggccagaatcacgtcctgccctctggctgcagcgacactacttcacagctcaggcccacccgggcagtctcccgggccagggccacaacccacgccttgtgacccctgcacgtcaacggcatcttccttcttcacgcccgccctcccacagcccggcgcagcggcctcccgcacgccccctgcccacctggcccccagccacctttcctcacctgggcctgcggggccgccccaactgtcccgctgcaaccccagcagcctcgccagttgggtccacgcctagcctgccggccttcgtcgctatccaatcccacctgcgcccgcgagcctgcgcactggagctttgccctgcgccgcggcactctgccctgcgccgcggccctctgcttgccaggccgggagagacagaacctgcctctaccggtcttccaaggcactgagagcccatcgccgcggacgccgctgtaaattccctgcgggccctgtgcaccaccctgtgcgcgtccccctctcccaggccaggctgataatgttaacagctctctgagctatgctcatatcctgaaccactgaggactgtgttctccaggaatgctcgcctgacccacgcctgccctctaagcccctaatgaggccccagagggctggggtgggggggtctctttgtagtatcagagcagggcagataggcaaaaggagtcagagcctgtgccagaatatgaggtcagttggctgctaggtcaattaagacaacttcagcaagggtggtcaatgtagagggaattcaatcgttggcattgcctgaaaacaggaagccagaatctttttatcttgacgaacaaacctctattcattggtcctgacctgagccactttggtgaatccagataccctgaaggtgtgacaagacctgcctcacttatcccccagccttcagtgctggtcccacagagagccatatgcttgagctgaactgcagttaagcagtgacagctaccctctgtccaggctctgaggccagctttctgctccgtgagtcactgacagtgagtctctacagagactttttctttctgtagcagccaaggtaccctgcaagcaacccacgccattgccatatgtcttagtttgtttgtgttgctataaagcaatacctgaggctgggtaatttataaagaaaagaggtttgttagtttcacagtttcacaggctgtaaaagaaacatggcaccaccacccgcttttgatgagggcctcaggaagcttccactcatggcagaagacaaaggagagccaatgtgtgcaagacagaggaagagagagaggtgggaggtgccaggctcttttccatgaccagttctcatgaaaacaaagactaagaactcactcagttccatgagactagcaccaagtcattcataaaggatctacccacatgacccagacacttcccaccaggccccacctccaacattggggatcaaatttcaacactagattttatttatttatttatttattttgagatggagtctcgctctgtcgcccaggctggagtgcagtggcgtgatctcagctcactgtaatctccacctccccagttcaagtgattctcctgcctcagcctccccagtagctgggactacaggagcatgccaccatgcctggctaatttttgtatttttagtagagacgaggtttcactgtgttggccaggctggtcttgaacacctgacctcaggtgatccgcccgcctcagcctcccaaagtgctgggattacaggcatgagccaacgcacccagcccaacattagatttagatgggacaaatatccaaactatatcaccagggtaagattcccctttaaagatggaccccatgtctaatgtttcttcatagtgcctaacatcaagattctgcactggtcatcatttcacaaacatgagcagcatggctgctccaagacacacagagggaataacccccattcacatcaccaggaaatccttgcatggaggctaaatgaacagttggtaagagtggaccctgaggtgtcattccatctcccccagacttcctgcttgaccacacaatattcccagaagccagtgacccagaaggctcttcttggctttctgtccttttacctgtgaaaaattcgaagaactataaagtttagggcccatcacagtttactacccttctttggaggcctctttaaacccttgagtcttaccaattaccagtagcactaggagctttgcaagcctggccttaagtccctgctttgctactgaatagttggtgacctttggcaggttacttcccaacttgtgtctcagttttcctttttttaaaaaaggagacacagttgcaagtgtttaatgacacaaaaaacagaagcattcatcaccacgcctggcagtgaacactgcttttcttgctcaagaggtttgagccatacgcttctctaggtctgtgactctcccagagtttctgggagttcctctgtgagcaacagacccactgcagtctccatactttaggggtaagcctggatgcccttcacacatcagtctggatgagttcatgcaccactcatccaaaagtgaatccaaaagtgattccaaaagcagaggccagagatctagttgctaatgttgcctctcctcatggttctaggattcagccacacagggcttcccattgcagcttcaggtcctcctcactccccagtgcaggcccagtttcactctcaggtcctccagcccaggcctcagttctgcctcttttagtccatccctccagatccactttccaacagggctgggaagtcgcttggttgtcccctgcctgctgcaccacagcccccagacaccgcctccttatttcctgcatggtccgaggctcaatgctaatccctgggtgtcttagtctgttttgtgctgctataacagaattcctgagcctggataatttgtaaagaacaaaacatttttttctcacagttctggagaatgggaagtccaagatcaggtgccagcatctggtgtgagtcttcttgctgcatcctccagaggagaggaacattgtgtcctcatgtggcagaaggcagagagcaaataggaaaaaggaaggcaaactcaccctcttctaatagcattaatctcacccagaaggacagagtcctcatggtcctttcacctcccgaaggtcccacctcctaacactgccacagcagcaaccaaatttctttgaatattaatacatgagtgtgggaggggacaaacattcaaatcatcacactgggaaggctcagctggaggagcagaattggccagcacagggaggtaatgctgggtttggaatttttgtctttgcagtccttggccttgatccggatacccagacgccctctgagatggaccttgagggccgtgccaatgtctgctctctgctgaggtagggctcatctactccttacaagtataagaacttactgccaaacataccctcctccaagccatgggtccccagatacagtcaggaggaccccagtggatagctggaactcaggacctcaggagagatcccaaggcctatgctcgagttcagagttttctaattcaggcttggagcccaggaacagaagataattaagaacaatactgacagaaaaaaataatcacttcattgacattacccttcacaggaccgcctgcttcaggcctgtgctttgcagcctggttcatttgggaatggtatgcttcacacccagccctgttaagtgtgagttgatgaggaccatgagcttggaagaagccgtgggggcctctctgtgtgtttctctctgccctgctttgagacacttcacataaaagactctataaaaataaactgtggagatttcaatgccagtaaaaatcccagtggaggtagaaaactatttaaagagcacaaggacatacatttatcttgttgtgaatccccggctgcctggtccctgagcctgacacacggcagatgcccaataaatattaatagattgatcaatttgttggctgctcatccatttgcagcttcagccagcccatggctctgcgtgcacacaccacaaggagagagaatccatagacttcgacaggagagagctgctcagctggcaggagagcctgccacaaacccttgaacataaatgtcctgccctccacttccagctctacgtactaactgtaaaataatgatgtggcagaaagtgaagtgcaaagactgccaaattctaagaaagaacctggtttcatgccttttaatccttatgagtcattccttggtctgcgccaagccctgtgctttacagcaagaatacagatgtcttcattgaactgcatctcattagctggacctaacagagtgcaaatttctttccaatgccatttgaactcaatgcccagatgcttttttcccctgggcccgtgcagatgaaatcttgggctggtttataactttgaacacccagaatattcccatttcagtttaagattccctctgacttatctaattgttaggctctcttcaccttcagcctgagaaatgggtaccatcaatttctcctttctcacccagcttcacacccaggccctccagactcagtgggtgtctgacacctctacagctggagtccttcagcaatgggccccctgggctcagcagatattttgagctggccatttcttctgtgagacaatcttgtgttttctcaggaattcccctgcagaagatctctgagtacaaacccatgcccagtgatgttgcctctgcccagctacttacaagaccattcctcggcccatccagggctaccaatctgtttatgtaatttgtgccatgaataaaggtaccagacaaatgagtaagtggaggctgagttgtaggcatggttttgtgccccaataatgggctgcacaggaaaggaagggccacctttgtgtaattcataagctacaggtggatgcctttttgtgattccccctaatgcatgctctgtgtgagctgaggctctggctctctctctgctggggtcaacatcacccctgcttgttttacaggctatgacctgcctgcagcttacttgcctacataaaaagggcatccgcgcccttgccctgacacagggattggcggttcactcctagcgccatcctctttctctttgctctcccgccagacatgttgttgccgtcatcacctctcaccatgagattgctcagggatgttccagacaccaagccctttcagaagacacatgtcaaaccctgtatatgatttgagcagtctttctcatgtggctggagggaaaggagaggtacctcattcctctcccctccacaaggaggggaaagaggtatggaaggggaaatgtcatagcattccaacaactcttttcagaggaattttctactcctggcctcaattttttataaaccctcatgggtgtgttagtggtggaagttatctaggttatcggtggcaaacctgtatgggtctgcagcaatctcaactcttgcctcctcagaagaaagaatctgaggtgcataaggcagaaggagaggccaagacaagtgttagagcaggagtgaaagttcattaaaaggctttagagcaggaacaaaaggaaagaaagtacacttggaagaggcccaggtgggcaacttgaaggacaagtgccccatttgaccttgaacctaggatttcatatgctgaccgacttccagcattttgcaccccatttcccttgatttttctctcagggtgagctacccacatgcacagtggcctactagcacctgggaggtgagcatgggcagtgtgtttagtggagctgtacgcatgttcacctgaggctttcttccctttcctggtggaatgcctctggaaggtcatactctgccattttgcccgttaatgtgcatgcttgagcccacttgcccaattcctgaaagctgccagttacagatgtttttatctattgggaagctgcctctctctggtgctggctgtgaccaattattctttcagagaggcaatgtgacaattgcctgaccatcacctgttggttgcctgacatttcttgttggtgggggtagccctctcctgctctgctcctgcctgactagctacctaccaggaactccaaatgactgcaagagagagtttggagatggtccaagagctgggattggaattggagaactaggttatagccagatactggagagtttcacatgccatgctaagaaatttgaactttatcccataggattgcaggtgaacgatattcagcaggagagtacctggtcttatttgcctctgagcatgctgggtggagaggcatgatgaaagtggagacctctttggtgtgcactaagtaggttaataagcaatgttcagagaatcttccattcaaagtaaaaaaatttctcacctttttttctcatttctcaaggtggtttctaattcggtcttgagagccagacattcttcctggtttgggttttgtattcttttatgagttcatcaatcaggtgaggccacaaggggagacttagtgctcaggaacacaaaatctattatactcttgggtcctagagacagcaggcacagcaggccacacaggaccacatggggaagacaccagggtggccaggagactgaggacaggagcatgcatttgatatacaaactaaccagcacagagctacatctctatctggccctacgctccagagaccatattcctctccttaatcatcccagggccaggtacaagacaactagaaaccgtgcctagagccaaagcccgctggaatgattcaaactagctagtcctaagctgttcaccctgccttgccttgcctttcccatggaaacccggtaaaagctatggcctaggtggccccctcacctgtcttctgcctcctgaccaccctgatgtctttcccatgtggagtggcatggaatgcctcctgtttctaggacctgtgtgtatcataaactttattttcctgagcctgtcctgggtctcttcttgtggccacacctgactgaccacatcataaaagaatacaaaacagcttgccaggtccttaggtgggcagcatgattgagtgagaagggcataggcctgggttttatttcagtgcctttatctacttgtggcctcagacaaattattgaacttctctgggtctcaatttcctcatctataaaaatgacccttgcagtgtacgagtcagaataaactagattatgctgctgtaatagataaaccctgaatcttagccacctgtatcagtaaaggtttccttcttgctctcagtgcatatgcagtgagggtcagctggccactctgctccctgctccctgacttagcacacaggctgatggcacgcccactgtctgtgatcacattaggatcttggtgacagatggaaggagcactctggtgggtcgtccacctgcaattaaatacaccggcatggaattggcaatccatgcctctcctcacagctccgtggttggaaatcacatggccctgctccaccacaaaggggccctgtgtgactaccacagatgcctactccacaggtgtagggtgagggttacatgggctacaacacaaagagcctggtgcagggcttgaaggctggcaggttctgacaaaactcttctaggaagagcagcctccacccacagctgtggtcaagactaccagattcgcactggcaagtactttagaaaaagcatactgtctacagtaacactgctaagcatggagacttatttatttatttttgagacagagttttgctcttgttgctcaggctggagtgcaatggtgtgatctcagctcactgcaacctctgcctcccgggttcaagcgattctcccgcctcagcctcccgagtagctggaattacaggtgcccaccatcatgtctggcttaatttttgtatttttagtagagatggggtttcaccatgttggccaggctgctctcgaactcctgacctcaggtgatccacccaccttggcctcccaaagtgctgggattgcaggcatgagccaccatgcctggccagagcttttcactttaaaattatttcaaaatggtaaaaggaaatctgaaaagtccagtgaaggaaaaccacttgggaaacagaaatcccaaagatcaggattgataaatgtctctatcttcgagttatagacagagagggctccaaggacaaaatttgaggaaagatggttgataatctcttgtgtaagaaagttttcatttgcaagaaacaggcagagcaacttaagctggcttaagcatgcatagactgattgccacaggagctccaagtcccgctgcatgacagggttcagttggttgattcagttataacaactgggaccccagctctcaccattcttcctgctctggcatccagagtgttgatttcgcttggcttcctttgaagacagatcccttttaaggtcatggaaaggctgtcagaagctatacagtggggtagataaataattgcttctggaaattttccctaaagatgtgtgggcacttttctaaaagtccctatgaaatatttgtgtgtttcactggcttaaatttaactatgacttctgtccctagcaagaagggttgccttaaagccaattgggccttcccttctcccccacctctccttaacttcttgtaaccactaatccattctccatttccataattttgtcattttaagaatgttctataaattgaatcatacttgtactacctttggggattggcattttctcattccacataactctctggagtttcatagaagttgttgtgagtatcaatagttatttcttttgatatggattaccacatgttacttagccattcacttatttgaaggatatctgggttctttctcatttggggtcattacaagttaagttgctatgaatattttcgtaaaggtttttgtataaacacaaatcttaatttctctaggataaatacccaaggtgcaattgctgggtcttatggtgatcgtgtgtttagtttcgtaagacccaatcaaaccattttccacaatgtatacactattttacattcccatgagcaatgtatgagcaatcccctttctccatgtcctcagcagcattaggtgttgtccttattttttatttgaccatcctgatacatatgtggagatatcttattgtagtttagtttgcatttccccagtggctaattgaagttgagcatcttttcatgtgcttatttgccatctgtatattatcttcagtgaaatatccattcatgtatttttcttattttctaatgggatttttttcttttgtcaaggttgagttttgtgagttctttatgtattctaaatactagtcctttgttccggatacttcctcctcatttgttgcttggatcttttatcctcttaacagagactttttacagagaaaaagaataaacaaaaaacaatttgtcaagttttccttttctttttacagatcatgcttttggtgtcaagtctgagaactctttgcctagccttagatcccaatgattttcttcccctttttttccctaaaaatcatatagttttgcattgacatgtaagtccaggatccatatggagttcatttttgtacaaggtgtgaggtttaatgtcaatgatctttttttttttttttcatctacggatgtcctattgttccagcaccatttattgaaaaagcaattctttcctcattgaatttctcctgcattttgtcaaatatcagttgggaatatttgtgtgggtctatttctggattatctattctgttccattgatctatgtgtccatctttctgtctcactattactgtagctatatagtaagccttaatattaattacagtgattcctcccactccactctactttttgaagattatagctattctagtgcttgtgcattttcaaataagtttcagaagatatttttatttgtataatgtaaattacattatgaatatacaataaaatttataaaattaatttcagaacaaactcatctatgattacaaaataccttgctaggattttggtaagaattgcattggacctataaaattaatttggggagaattgatgcttttactatgttgagtttggaagcccacttttgcactacaatttagtgctgaatatgtatatgctttagcaacctcataacaacggtgtgctggcacataataggagcttcataaatatttatggcagggaggaaggatgggaaggccaagtgaagtcttgaagagtttggatcagttgtccttaaatctggccacagaaacaaccatctgctgagcttggtaaaagtacagatttctgggcttcatctcagccctactgattcagaatctccgggatgaggccagtgaatctgtattttgaacacctgctatagttgatcctcaagcacagccaggtttgtagcatgtagcagccaacaatggaagcagtgtgcaggcgctgagctgagtctcctaggaattagctgttctttctgacatttgccctgaaacaaagcaagtggtagctgcaattgagtccacctaagacaaattaacatgttcttcctgatatatggctcaaaatgagtatagcagcctgggagtcaagggtggtcctttcctacaaggaggaggaccagatgtattttgagcctgtatccaccaatttcttttccaaagaggaaataagcaaccaatgttcagcagaatgtgagcagttcctaaattgtaaatactgttatttaatcacttcattgcatacttgattagttccctaaccttgaggcctgtgaaactgtaatgatgcaccaggggagctggcctcagctctgagagaatttagaacaaggctgttcagatccctggaaacatctttttcattaatagcagaagaagccaaatgacccataagatttttctgtcataaggagaacagaaaaattagaaacaaaagcacatagaggagagttcatgaattagattttagagcacagacttttttaatcttagtctttgtttttgtttggttggttattgttgctttccttctcttattttgcagtttcagtctctttattttcaatgtaaaatttattatataagtaatagatatataaaggtaatttttaacaaaataaagtgtattctcctaatcccatcacccaaactttggtcaatttctgttccattgctgagcctcccctctgttcacggtgcttctccttgtgcctgcgaggcattccatagttgtaaccagcatgtaattctgagttattatatcaaacactttactaagttgcgagttcttcgtagttatattactttcttggcagtgcagtattctattatgctattgtaccatcattttctctaatgttatcattattctaatgcatttcagccaattccaatttgttgtttttatcaagagcactacagtgaacatttttaaataaattgatttttttcttattctggattatttctgtgggataattctcagggatttcattgttgggtcagtgggtatacccatttttatagcttttgatatttctgaatatgccagcttcagcaaaattttgccagcattggacagtttttttaaattttatgaatgtaatgaatgcaaatcagtatattgacattgttttggttagaatattttgtgtgtttgttggccatttgtattttatcgtatattttgtctatggaaatcctgtattgatctattataaattaaaatgggctttctaaatattaaaaatattaatctttgttcacaattatgtaaatgctttcccaacccattgctattctttttacatgagttttgtcattattattgtatggaagtttaaactttttcaatattgtcagctttgtaggttttctgttgttatacttttggtctactgcagtaagctggaagagtgatcattcctctgcagatctgataaaacgagagcctgtttcctaccagtctttctctgatgtgtgtgtgtgtgtgtgtgtgtgtgtgtgtgtgtgttttatgtgattctagtagatgaagtgggctttgaaactgaatcatttttccagctctcccagttgtatcaatgaagttgtctccccttcccctatgctgagaccccaactttgccctgctttctctgttacacagcaccagatatgctcctgggcctgcctgtggtcccccagtgtttcttttgtgcatttgctaatccatgtgtctttagttctttgtcctaatatggggtaatgctggatctaacacatcactctgctttctttactagatatccccatcttatttttccttcatatgctttgtagaatcaggtataaagtccaaaaggaaagtccttttaaaagaatgtatagctatgtggagttgtatagaaaagatacagaaagatatcaaaacatattacacccataaccttggagccaagccccttaacagagtccttccactgtgataaccataaaactcctttgttccaaggtgaactatgaagtgcaccctgcaacactgtatctgtcccggagagtgtgtgccagtgctgcagcaagacttcaccctgcctggggtatcttggaggaagagattggttctcaattcctttcacaaagggaagcccccacccccttctcaccacctccccttcccacacacacacacacacacacacacacacgcgcacaaagctttgctggacgtaaaccccagaactgaagagaggcaacagccatgattcaaaatgagtcttggaattgacaagcatgctcttcttgaagtgagctcttaacaactgggccaggcccttcatcccaggtcacctttgcaggagcctacaggtttctttcccagtggcagagctggtgggtacactctttggaccaaggtcacctgagggctcttctgtccaaaggacctccatgcagaaaccctcagtctctgcctcggaagacggctgttctctgtgtttatctaaaacaataagcagcttttaatgggtgacctcgtcattttgccagtagccttccctaaacagaacagttccgtcctcttcttaatcccactgagcaagggagttttccttagcctcataaaagagaaatattttgtgaaggaaaagtaggactcatgccactttatggaaagacctgtgttacacaaattcacatgaaagacacattctaggggaaatgtgaaaagccaccaaaagtagaagcagacagatgtagtgtgaatccacctgtcctacctgtatgagctcaggaaattaaatcttctaagcccccttaatttttttttttttttttttgagacagagtctcgctctttcacccaggccggagtgtagtggcactatcttggctcactgcaagctctgcctccttggttcatgccattctcctgcctcagcctcccaagtagctgggactacaggcacctaccaccacgcccagctactttttgtatttttagtagagatggggtttcaccatgttagccaggatggtctcgatctcctgacctcgtgatccaccctcctcagcctcccaaagtgctgggattacaggcgtgagccaccgcacccagccctaagccccctttaaaaacagaaataagaatatcactcaaaactgacataaggattaagttaaatcacatgtagaaactaccttaagacgcactatgactgtcttaatgtctaaaaggaccaaatgaaataattggtgattaggtttaaaggctacactgctctgtaggcaaagtcctctttataaatgagataatatatacagtggagggggttcagcttataggggttatagacactttggagaatttaaaggctgttaagacctgtatttcccaaaagaagcacacaagtcaacattctaggtgcaatagcccatagatgccatgaagaacacctgtgggctgctgcatggagccaaactaagaactcatgccttgggcactcatgttggcacacccatcctctgtctgcaggggagggtgagacctgttctcctttttgtgcaggatcagtgattctaacaggactcaccctgagcacagcccatgctacagtccatatatagatgagggcatggtagagcctggcacccttgccataggtgagtgcttctccccacccagacccataccacatgttagggcacaagtccaactgtctggtttctttgactacatggaaaaaacccaacaggattgaatgcattaaaaagcttatatcttctcactggagtaattctctcctttgtgattgatgataaaaatagctaatgttttttaagcgcttaccactacacacctggcgttgtcataaccgcatgaagtgggtttggttatctggcagtcagctgcatattgaatggtttaaaagtcatgtgctgcaggtctcccagccagtgagtggcagggccaggcttcaaatctgagctcccccaaccacaatgccacatcttctgcctttctcttcccggctggctcagacgcactgcagatctcagtggactggcccttgtggtccccaccaattgctcagccttcttctttctgtttcccagccctgcggagccagctccaagaagactgccccctgcatacaagctgcttcctgcttgcccacatttctgtgaatccataacgtacactcccaatgctgtaaagtgttgtacttccccataaatgaacatgcacagtcttcaaagcctctgaatcttccactctattaacttgttgcttcctatttcagataagaaccagcccttttgttatattttaatttcaaatatccactctccttatcagctggcccaccactgtcctctgaggctccagctcaatcatttgtggtggctgagcttccttatgtacagccaggaaaatggagctgggacacaataggaggaaagttaaggagtgggtttcaattatacttgaaacttctcaaactgttgtctcgttaagtttcagtggaccttgaaactgtgtttatgtgaaagtttttggaacattcagcatttttaaatatacactgtaagtactttaacagaatgttgagtggttacagacctgcccagaatttaacctcccttcctcccagtgtgacagtttctgttgcccttactttttctgtgtcctcatcaatatgttctgaccctgcctggtgaccaggtcagcttctggtggctccttgcattaacagtgagactttcctgatgctggtctatactcagccacagcagtccaacaagatgggccctatgacaggacaccaagactcttctctgcagtacatccagcagaggggcaggtaggagcaggcaaaacaggaatcagcactagacattcagacccccaaaagagagagacctgaggagagggatgcacactcctgtacataggaggcagaacagatgggtgctcgacaggtgggccgtggagtggggaaccgatcaggtttgaattctagttctgtcacttacttattggataaccttgggaaagccccaaatgtgtcatgtgtgaaatgggggtgatgacagtccccatgttgtaggtcgttgtcatggtgcaagggccatggtaagtgttctgtgaaaatggccattacaatgacgcatgacccccaaagaagatgcaggggaaactgggcaatgcccacagaccatcccccacccccagttgaagtggcttgatagcactgagccctgctctggtcagagctcagccccagttcacccagccagagtgacacccacctgagggcaccgtattccagggccacaggctcctccaggtcttcccattcactcccactctctggggactcttctggaggcaaagactctgggacagtgccccaagagcagaactgtggcaagggaatggtcccagaatctgcctccaaacattcttcacagggtagctggccttggcatgtagagttgatggtaagatactcttcatcctccgaggtgggagaaggggctccacatggatggtacatgtcaccttccccatcctccccatccaattcaggactagaatacagaagcccatgtttcttccagccttgataaaaaaaattcctcaccccaccttccccttgccttttagaatactctgcacgacacaggcccgtgagactcagccagtgttcaaacagctcatgccagaggctgctctgggcaccaggaagcaagaaacttataaggcaccaaccctggctttgaggagcccccaatttaatgagaagttggagcagtaaagaaatgttacagtccatgtaggaagtgctatggtagaggcagctggagcaccttaccgagctcaggagaccaggggggtgggggggcttgccagagggcacagcattgcaagcagggcaatgacccagttctaagacagactcgtcacatggcaagcagagtcggtcagactttggacaagtttattgacttctttggaacctcagttttctcatttgacaaaactagatggtcaagaagcatctaggattattgggacacgtaaattacataattctgacacagcccccccaactctgggttcctggtatggggtaagtttttagtaaatgtgagatgctgtgattagtactgtgaatatgatggctatttcaacagaagaattataaagaaagggcttcaggaagggattgggagtgactcaagcaggcaaccatcaaagcactttgtgcaaagatcaggtccttttctgagcactgaaaatttgcctatttagagatgcggcaagctgaagtgacatttactccccgcggaaggacacaggaggcagacaagtggtgaagctcattatctggtgatgcagccgcagacgtaatggtcaaagaacaagacttccaggggctgccccaagttcgccacacacgcctcttgattagaaagaatagtccatgcaaaggtagggcattttacacagcactgcagacatgcagagaaggtgctcagaaaatatctgtcgaaagtctggttagaggagatgagaaggaatatctaagagaaaagcacaaagatttagcaaatacatggatcctcatttctcagcctccttacccccacccaaatcaatgggttggctttgttatgtgctgctgctctccttctcctttcctgcattgcctctttctcttaaaattggctctggtgcaccccaatagctacaaacccttagatacccagagagcacgtcctcctccccagtagagccggaagcatctgtcccaaactgagcttcactgtgaaagagacattatttccactcatgagagctacaaggtatgtgaaatagtgaatttcatgtaaatatatgcacactcaagtgtataaaaaagaaattattctacaaagactgaagaggaacactcactgtcaaaagacatttttaattcttgagcatttgcagggaaaattgactttaagcttggctaaatcatgtagaaactgtgttttcttataaacatgggaaagaaacattcaagaagttttatcaaagaatgggaaatctagcctattgcccaggcctaggctcaccactgtccccaccacctcaagcagcacccccttccctcctttctgagctcactaagccttgttgaggagtggaagatggcagctgtatgtgtccattggccactgcagctgcctcagtgtccacacctcacctcccacccatagactccctccacctcttctaataagctccttgccctctggttttgattctgagctccagctactggctctgcctggacagagacctagagaagccatcagcctgagaggcaagaggcaaggcttcatctgaggttcaaccaaagaaaaagcgatttgctccccacttgtccagggggacttggtggtcccaagggtgaaatcgtggccatcatcccaccacaagttgggagaacgactgcctttccttctatccttttgcacgtgccatcaggctgcccttggagatttgacctggggctcaactgtggacatagggaaagggtgaatagggaataaagaggcaccagaagcctgtatgcctatttcacagaaagggcaagacttggaaatttggagaatttcattaagatagagacattctttcacagcaagcctcatgttttgcatgtggacatgatgggtaaagaggtggagttcttcacccagggttcaaggccggccagctcatggctaatgtagcaggactttcagcaagaccctgatgctgtcggagtacacggggctctctgctcaccccctgattctgtgtaatgatctcagcttcttcctgccctcactctctgcccaccaagctgtccaacagaaggaggcttttatagacagatgataactagaggagaatctggagatttcacttgggcttcctggccagccatgtctcccatacaaaccagcaggaccccagaaccagggtccccaccaagtcctgaaactcttcagtgggtatttttaagaggaatcccagttcagctctgaagtcagtgaaaccattctgaaggctctgcttgctacagaatgtttactgagaaaagacactgtgcccaacttttctggacagctgtcctttaaagacttgggccaccaaattcatctctgcctttcaggaggaaattcatagaagcagattgggcatttcaggcttgaaatatgaaggtattataattgtcctatttacttacggttaaactcacaacaaagtttggggtttgtgtcccttcatgtctccagttctccaacatcaggccccatactgatgtctccattagccctgatgacacagctgggagccccaggtctctgctcctgacaactgcatttagttttggcaggttggatttacagtatctctaagacatcaaagtaaacaagttcaacggactgccagatttgaagctcagatgataaatctgagctgaagtacaatacttaggatttgtcacagtagtgtggacagatacccctgggtatctggggatacccaaggatagccctgggagcctgtaaggtgtaaagagaatcctgctagaggcagcatccaggatctagcccaggctctgccgcctccctcactcccctcagccacactccaacccaagagcaggcatgacatctccctcacctggcaactgcatccctccctaactactctgacatcacacctggcctggcccctgcagttgagtgagatctctggcctcctaattatcttttgctattccaggcagtgcccttccccagaaggtatatcataactttaggttcatttccaggagtcctgcttcattttgctttcttaaataaatgaccatcaagatttataccatcactttcacaaagtgatgcttgtggaacttacgtgcattttacttacatgagtttaatgatatgtgctaggcaaaaagagaaagagaaagataaccttaaacattctgcaaagaccaactttccaaccgataagtgtaagccttgaagtgcacatgagtgggagaactaaatctttcatcctgtcaatctgtctctgtttctattgggccagcatttaaagacaaacattttgcatacagcatggcccataaatgcaagcctcctaacttcatctgaggctcgaccaaacaaaaagtgatttgctcccacaccaaggggcaaataacatcactccttccaaagtgatgtttcaagggtaatgagacttgatgtgattgttgccttctgcctacctttaggaactaaccttataaaaaacatgtctccagccaagctttccctctgataggcacgtaatccaactctccttcataaaaatgtactgtactgctttattacaagatatttttataaagatctactactagatggtaaaatctctagatatagagtgtgagaaaagagaacagggaaagaaagtgaaatcgaatcttgtccatgaacactttgggtttgctgtggtgctggcagccatctggctgtaggaaattgccacctggcagatggtaagttccggcaatttgctgggaatttcaattgaagggacctgttctttagctggaaatagctcaggaaagggaaggaaaacagacttgcattgagttcttaccgcatgccaggcactgtgacagcaccctgagcgtgctatttcttttgacctgcacagtaccctgtggaactgtcatggtccccatttacatttgggaagcctccagcttagggaaggcaacgctccaggcatactagtaagtggcaacgctgaaaccacataataggatacagaaatccatgctctttttgttgaagagtttaactcacagatgccagacacttaagaggcagtggcctgcgacagtcacctcagaactgagctgcaaacacttctaaggcttctgcagagtcacaatcccactttggaatcctgattcagaccctatccaggagctgggggaactgtgtccaggggtcgctgggcatgcgtccctcttttcttcctgtagggggcagccactatgtgtgcattaaatgcaaactgacgtcctattggaggagaggtggacttggtttgagttctttcagaggggaggaaaggttcctaagtgagggagggaaaacgaagtaaaaataaagccaggaaatgtgatgaggcagaaagcattcatcaacagaactaccacagggaggcaagagaaaaagggggtgcggttggccattgagagagccaggataccgagaacagtaaagctgcctgcccacagttcatccatgggtacatggaccatgtgggcccggcagtgagtatgatggttgatgggcgttcacaacagactgaagataggagactcccctggaatgctctggacaagcccttgggactctcgtgtggctctaaaaggagcagtccctccaagaatgacagattttggacatctggtatacccttgcaaatagggccactaagccaaatttaatttggttcagaaaaacagaataatgtgatgtttgatgaaaaaaaaaaaaaaaacagcaaatgctaacagataggcagaaataggtatccggacttggaagtagaagacataaagaggcataaagatgtggaagatgtgggagcaaatcactttttctttggttgagcttcagatgaagttaggaggcttgaatttatgagccatgctgtatgcaaaatgtgtaactttaaatgctggccctataagaacagcataacagcataaagatttcaccttaatgtaaggaagaaccttctgatcagtaactagatgatgataaaatgggtcattcaagaggtagcaagttccgcatccctgcagatattcaagcaaaagctgggaccccttcttcaggaatgttatggagcagattccagcatggagtttgaggctagactagatcatttttatattgaacaggctgattttctgtagtttaatgaatgaaacagtgactgcctatactaatagtttaaaataccattttaaataactattggctatattaaattaaaggcacttggcaagtcaaattcccagcttgtacctatacccagggtcactttataattcagctctcagggtccctgttcattatcccaagctatctggcagcaaaacctttcaatatccaaacaagtgcctcctccctacaggaaagtaccgttcctgtaatatatcctttaagatcatggtaatagttgtccttggacaagtctctgtaggttactttctttattattttatcaagtatgtcaattactgcctagactgcaattgtaaagaactataaatacacttatgttatacattatcagacaacgaaagtgaatatcattgatgaatgtgcttgttcaccctgttctactttgcaaaccagttagcttttgtttggctgacacagcattcttcaaaaaattgtagcagggtacttttagggaatgcatgcctggctcctgcttgtcacagctctcatcgggtccaacggtattacacgactgcttcacacttcacagagactatcatttcctatggatctacctttgacagtcgtctaggatggctaccaaatgagagccatttaatctcagtgggtttatagagtgtcaaacacaaacaattgccccttgttatttacctgctttgtgcccatgcctctggctggcaaatgctagaagcaggtcttaccctacatgtgcagccctctgtctgctctcaacaggtttccaagcaccttgtgtaataagtacttgtcaaactgaatcaaagactatgtgttccctcagcataggactgagaatcggaaatacttacagatggatggacacaaaaatgcagactaaatttaaaatgactgtgaaaatgaatgttgcagggtggtcttgaagatatagatgtgttcagaaaacaaaagctggtgtagccaggcatgatggctggtgcctgtagacccagctattgaccggctgaggtgggaggatcacttgagcccaggattttgaattcagcctgggcaacatagtaagaccccatctttaaaaaaaaaaaaaaaagctgatgttgataatgaagcattatactagcaatagaaacgaggatgcatgtaggaacttccttcttactacaaagctttaacaggccatggaagatacaagagaaaggtttgtgtgccaggagaaaacctgaggcctgccacctatagcttccaagacatattggggacaattgtggtctgggtagggtttgctttcccaaaagctcacaggtggtcacagcagcaccagaccttatgcttctcttgttgcaacctctcttctaaatgcctggaacagtgctgggcacaaaatcatccaagcatagttattgatggcttgattacaatttcctagcaatgagatgcacatagtttacaaaatgtctgcaaatgtggtgattcttaccttccaagtctcatgatatcacaaactgaatagcagttttgcctcacatccttttccaaagaggtcgccaatgttgattcatccctttcttggtgaagtttgcataaatgagggtgggactcaggagaatgtgtcaaggaactggcccaaggtctctctctgttttggccccattgtgcctctctgatggccttttgggaagactctggcctgagacccaggccttcccctgcatctggggaggcactgtccctccagctgtcctcttgatccaggatggggctggtacatgagtcagtacatgttgccctggtgaattctttgtcagctgagagttcaggtgtctattaaaagaaatgctactaattactggctgcgggatgcacattgtttttttaaaaatacaaagcttttttcccccatgtgattatagatcagagtagttacaagatgggctttgaggtctgtctatcaccatagcatcccagctcctccacatgctcccagctggacactgggcaacacactcaggcaccttagcttagggggctttggaagctctccataaatgtgagccttatttttaaataaaaaatatttgcaaaatttagacaaagataaaaatggaagataaatatgcaaaacaatgactctattccactttccgataagaaatgtttctttttaagtttttcatcttcatctgtcatctcagggcttgtctccctgtctccacccccatcaaggtgatgttctttcctgggtctcctcctcactttcccagacatgacttgcttcgtctcaactgctcacctccctgtcagccttttaggttctggttttgatgatgtgctatgtcttgctgccactgcttgaccttctacagaaaaacaatctgtgtttcagtagaaaactgtttttatctacagcagaacttgctgggttctctgattctggctgtctccactgtctttgagctattttacaactctataaataaacaggtcctttgaaatctcttttgagccagttttaacatctgcctggttccctcactgaatgagttaaataaaatctttaacgtgttcatttttatatctgtaggaatcatgattttaccttttcctgaaaattatcttccagcacttccaccccatgatctccatacctgatgtaatagagcccatgcctgggttcccacccctgccctcacctacaaaagaagaaccaccccaatgagtggtctccccacatttctgattgtacatccctaacaatgagagggatacacctccaaatgtgcacatttatttaattataaatcataaacatttactactcttctgatagactggacattataaaggatacaccaaaaatcaaaattttaagaagaccatattttgtcacattttcatactctttggagagacctccaaaatctgttttctaacctatcctctccttctagctcattatccctggacatgctctccagcaatccttccccactccaagacctccagtctgtggagctgctgcttttcatcattacccccactccccttccctgtcacacatgtcctcggtgtgcctcttattctgcttagattccatggctctgcccctagatgctcacttacagacaaggaagaccctgagctcccacctccttgcccctctcttcctccatcacgtgtcacttgcagattctgagtttccattttaattcctactcaaactgtgtgaacctcacccctgcttctgagcctctgactagattagcttcaagtgtgtgactgcagatgtcaaatgggcagtcaagacttccacataatctttgtctgtgtccttaatcaattcagttttctacctctgctctctaaattatttctcatcttgtctctctcttcaagtttctaacaactccaccctgaccttgcctgtgacctcacagtgagaatggacacgttcagatgagaactcttcatcttcccacagcaaattccactgagcagcctgtgcccctaccccaacttcagcttccacctctcaccacccatttctgtgctctacttcatggcagcctcttagatgagtgtctcttctcaccgtttccacgcctccctccttctttcttgcacccactagcaccagccttctgtccttaccacccaagggaaggagcccacatcagggtccccagcgacctctatctttctaaagctgaagaacaatattttgtcctttcactctctctctcagcaacgttcaacaaagtgtgtccctccctccttcctgagagcttccttgctcattagccctacttacatggagttgaccatgagccccacccttgcttggtttttccaccaattcccaggccccatcttaatctcatatgttgtcccatctctgtaccaggcctctcaatgttgttatgctctgtgctgacttctcagtcctctccttgaacttatctgcactctttcccaaggtgatctcaaccatttcatggctttacacgacctctatatatgctgacaactcccaaattcacttttcccagccccgatctcatgcctattctccacaactgcctaatagactcttcactggatagcctataaacatctcagttttaaatgataccaagaactattgtttctcttccatgcaccccagatggccttccccagcccctgtaagcagtccctctcttgggaactggtaccaagagagatgaagtggaaaataggatctatgattaccctcctaaagcatgaaataggtatatgtgatctagtgcaaagaagagaggtattggaatcaggaaaatcaggctttttaccttcttacccctccttcaccctgcattggtggtagcaccatttccccaaggcttcctcgtgccaaagcttgattgctctctttcctcatgcctgtttctaatcccaaagtagtctcctgaactccgcctcccagatgtatcccaaatctggctgcttcttaacacttcagctacagcctgagtccaagccacatcatgtttgacctgaatgactgctgcttgacctcctttagtccctgtgcaccagtaacccgagtggcccctctgaagaacggaggagggcatttcctgcttaaccctccatgccagcccagtggcttcccactgcatgcaggatggtggcatcatgctcctctgatccccaaggccctccagggtccctgccacctccacaacttcctccacttctgcttcattaacgatggcccaagcacacttgtatttttgtccctcaaacatccaagtgggttcccatctcagggcctttgttcatgctgttccttctgcctggaatgcccttaccccaaatgtgggcatggctgcctccttctcagaggtgctttactttatggactaaatgcttgctccccagagctgctgacccttgttctgcaatctgaccactggagccacccaagcaaatcacaatcctcccacttggccttcgggtatgaggagggaaagctcacccccacacctcacctggacccttcctgctagatctttatgggctctcctgggaggagctattctccaggatggaaataccacttttttccctgggatttcctagatatttcaacaaaaacacagggtcccagcaccttggcctgaatttgtgtgtgtgaaatttggccctctctcacctggttcggtttcttaacacaattgctgctgtctaccttcttttccaacccagcaacttttggatatctttcccatagctcttccctccctagaggctatgtcaaatgacctcttggagtctaagcatcaacaggatctgggacatcaagtcctttatgttgtcctagtgatggtgtcaccctcaggcacaataagtgatcacttttatccacatcctagagatgaggaatcatggggcctagagaggacaggcaactgcccaaggcccatgcagcacagcaggtacaggtgatccaggtacccgcccagatccccctccaggactgagattcgcatcctactgcctcatctcccctcccctggggcagcccacaccccagcgctggttagggcaacaagcaaaggcacaggttctcttgtcccaattcatggcagctccaaggggccatctctgctccagggctccctccagaatcagctgaggccctgtttatagctgcacattgatctctccttctgccccaccccacctcagtcaccctcacaggggatgttctcaagcgcaggccccataaaacctcccacgctcacatctctgctgcaaaatctgtttcctaggaaccccacagaaggcatggcaatgggtaattgtatctgtcaacttggctaggccatggtacacagataggcggtcacataccatctagatgtcactgtgaaggtatttttttttagatgtgatttgacatttaaatcagcaaactttgagtaaaacagattgtcttccataatgtagtgggcctcatgctgtcagctgaagcccttaagaggaaagactgacctctctgaggaggagggagttctgcctccagaccacctttgggcttgatctccatcaattattctctgggtctccagcctgctggcctcccctgtagaattggactggccagccctcaaaatcacatgaaccaattcctataataaatctctttctctcactctcttcatatataaacacacacataaacacacacacacacacacacactcattctatctgttctatttctctgagaacctgactaatatatgtgtcaaggtaaaaatccctattttcctgattccaatggctctcttctttgaaccagactgcacgtgcctatttcatgctttaggagggtaatcatatatcctattttccacatcatctctcagaatggaaattcttattggaaattcccttggtctgcttctgtgtctactctccttcttcccaggcttccctctctgatgcctgagcttccagagagcctggccctaaaagtttcacagccaaagtctaaacatgtaaacatctacaagaagacccaaatgtcagaagaggcagaatcagggagaggaaggagacctactgaggtttgggggccagctattttcctacccctgtgaaaggaggtggcactgaacctatctacaaccctcttaggaccctagagtctggaaaaggggggcccaaccagagccaggtagagagagtagaagacactgcagcctacctgccattcctgctccatctcaggcagcgcacctggagggggtcggcaaaggaggagcgtgacttcctgtggggcccctctcagtaaatgcagcacctcctgcgagaaaccaagattcactgttagatttgggcttgcattgctggggatgcagtgatgttctccccactgcgtcccaggcactagctcctcctccctgcaccttgatctatttctcactccagagaactccggagaaccctgctgtgggcctgacttttcaaagtgcaaggaaccaaggtcagtggcctgcagcttccacaaagttgatgcaagatgctgggctgtgcatcacctttgtgcagcttgggttctgggaacctctcatctgtaatattgcagtaacctcctctccgctccctgccttcaccagtgtcacccacctgcctccttccacattgctcaagggaatggcaatatctgccaataccaatgccttttcttcagagagagaaagaatgactccaacaaatagctgttcatctcaattgccctttcctcccaacctgccctcatcttgggccaccaattttgcagcctccaccatctgaatctctaaagcctgacccttggctctgagcttcctatcagggctcggcttgggctctgggaacctctcacctgtagtattgcagtgacctcctcactgcttgctgccttctccagtgtcacccacctgcctccctctgcaatgctcaagggtagttttccacagtgcagatataactgagtccttcccccactgcacaccctggctgactcacttttccctcaatgtaagctccaaggcatagcacatagaccccgtttctgcctgcctctgcctctcaccacagttccctctctcccatctactcccctctgcacccacgtcctaagcccctgccatgctgaatctgttgctccaagccaccctctcaatgtccagggttcaaggttgcctcgatagctcctatttcctatttagaccaggatttctcaaactcttggcactgttgacctctcaggctggacaattccttatgcgaatgcctgtcctgtgcattgtagggtgtttagcagcatctctgatctctactcactagatgccagaagcactcatcagttgtgacaatcacaaatgtctctggacttaatcaaatatcccatgagaaggaaataatctctgcttaagaactgctgatcaagacactccccagtccctgcttcagccacgcaggacttccaaggggtgcacttctttcctggctcactggtgtgagcactgcagcatgggctttcatctctcaggatacatatctcctgccatcaccgctgttttctgtccatgagctctgaaactgcatgagctgtcttcctctgtgtcttcagtctctcatagagttgccagcccagcagtggttctcagagaagggttcttggatcaggagatggatggatgaaggcatgccctcccacccaagcatatggtgttctagagacctccccccagccctgcccagagccactgtccccctttgtccatcttgctttgtgtttctggagctgacttataaaggctgcatgaggcttcctgttgggctcagctaggggaacacggcaagagaccagagacagggaggagcggaggtcattgctccttccaaattcctcccttcaggttgccatgggacgactacaacctcagccaaagtgagagctcatgccagcgagtcccctccaacagctctccattcctggggtggaataactgctctttcccttcccctttggcctcaggataggggtaactgcatcccactcttcctatcctagccctaggccacaacatgctcccttgagcttcctaacaacctgcccacacctttattaaatgttcctcaaatgactccattttcttccaggactctgtctaatatatacagtatttcattactctctcttcttaaattgcattttttatcatagacaggacaatcagtgtaataatgtatgaaaagctgtaaatgtgttgagaaatgggaaggagagcagaaagggacccactctagtcccttcagccccacgcccacctcccaggatgtgtgtgaagagacgtcagccagcacaaaggccagggctttatcttcagcttctctcatgaacccagtgagaagcaaggctgactcaaggtcagatatttaaaaacagagattttaaattaaatgtgagcatgtaccactaattactctctttgtgtgattaaaatccgggctgctggtgtgatttttgagagcccagagttttccccacggcagcaggctagtaagaggcaaagctggggccagcctgcacagagagctgcattgcccatgacccccggcacctggaagatgaggccttccgtggaccttccattcacggccaggataatgtcaccagctgcaatggccccattctcctcagctggctgccccggaaagagcctcttaatcctcacaagatcacttttgagatggctgcagctctctttctccatctgcacgaaactgaatcccaaaccattggcattcttttttagtttgacttcaaacttaggacctgtagtgtgggatgttgataaaaataaattcttcagtagattacaagtgaaattgaccagtctcaaaatgcagattgtcaagtagatgaattatttcttttacgttcaaataattcctttgctaattttatgacagagtacattatgtatgttatagattagtgctgtccaataaaatataatgtgagctataaatacaaaccacaaatgtcattttgaagttttcaaatagctacattaaaataaaaggaaaaagcaaacaaaaaataaataaaacaatttaaaaagtaaaaggaaacaggttaaatacgctataatcgtacatctaatttaatcccatatatctaaaatattaccacttcaacatgtcatcaatatgaaaaaattattaacgagatattttttattcttcttacgaactaagctttcaaaatccaatacatattttatccatttagattggtcacatttcaagtcctcaataaccacatgtggcaagtggctaccatattgaatagcacaattatagataactcaactatgtttatacataaagatatagctgctaggcatacacaacatgctcttggcatttaataaaacttgtatcacatacattcctattactcctttagaactctagtcatttgtagtatacttgaaactaaattttgaataattagaccatggagaaaattatggccaattctatggacaatgctttagctgccattttgtttacccatgtaggctgaccataagacaaaacagttgcctctgggcaccaaggatgaacagagctggcaacctacatggtctgtccaccaaagaggcctctgggctgccccgctggcatcaatgcacagagggacagagcacagcttgcaaacttcaccagggcaagaatggaagcatgtgaagcaattatgtgaagcaattatgtgaaggtgtgtcacacgaccagttctaccatcgccctaaggcctcctccactctttggagtccatttctcaaaggccccaagggagtgagcaaaggggtgaggacagaggagacttgatttaaacagaagcatgcccctttgccccacccctaccctatggctggcttgagtcttctgcagcaaaatcagaaaatctctatgaagggactaaaacatggctaaggtccaaatcgttcttactgaggaaatcagcgtgttcctggcaaataccaaaatcacaagggaattgcagatgggcagcccatcggaaaacgtgcagttttgtccctctaaatgatcgttcgtttgccttttaaaatgatgctaataacaaggctagattcctgaaccttctctcccaacctgcctagtcattcctcaaataactttgttacaaatgacttggctggactgtgaagccaaatgtatctgaaagtgtatgaccctttcagtcaatttcatcctaaatattcacacaaacattaacattctggcagctgatcaaaggactgaggaaggctgggggcagaaagatgcctagaaatcatttggggaaaatgcatttgtttccagaaacctattccatgagatgggcttccatggcatgaaaaagccgatctcagcatgatcaccatggctcgctttcttttcaggacccagaggaagccttcctgcctttcccttttgacttgacaattcaaaagcggcacacaataacatgacaatagtaacactcaattctctcccctctcaccatctgtcaccgagacacagctcgaaggcctgccaggcaaggctgttaccaaggaaacagccgtgcgttcatctcccatgctgtcattagcagaaggacactgctgtgtactcctggggactcttctctctaagaccagtcttgcaacctagaaggaaaggtgaacaaactcagtttacacttcatatggcaaccaggaggcactcccttgactctgcaaatgcttcttaattttcgaatccttcctataagcagactcatttgaatctctcaactagcctatatattgggatctagacccagatttctcagtgcttattagacaagtgcacctgaaagcaacacatgtacctccacttcacacatgcagtgccacactcatcttcctcccctcactcaccctcacttcccctcctcattcttcctaaaacactcctcccctcgcattggctcaccccaccattaacctgccaagggccacatttggagtggtccagctctcccccatctggtttctaagatgtgaacattccccatcaagaacagctcctcagtgccccctcccctccacctcctctctcactgccagtgacccgctgggccgtggcaagctctggttaccttggctcgctggaccctgtctgcaaccttcttggtccaccccatcatggctgccagtgaattggtctaagacaaaaactgaacatgcaacattcttgatttgaagtctccaatgcttcccatcacctaagacccaaacccatggcaccccaggtctgtaccacctgccctcccctttctttccaatgtgatttcccacatttctccccacaacaccatatacccttgtcgccctaagtgtgattcaagaaccagcagatagacatcacctggaagcttctcagaaatgccaagctcccattcagggcatgtggccctgccttcatcttcctgttgcacctgtcactcagcacctggcccaggatcccagagggacaattcctacctgcttaagctgccaggaggccagccaagtaccctctctacccatgctcattagcaaaggtctaaatatcagaaggtgccaataaattatggctctgttctcaagataggtcaaccaaagtcactaatataagcaaatttcaccagacaccagaaaaacgctttgggaaagaaagcgaaaagtggccagaacattgccccaagcttgctggaagggccttcaggaatccctcctgtctctgttgactttttagttgccaaaagagggtgatgccagctctgtggctcaggacacagaggcagttagaggctcctaacctcaggcagaggactcggcacagtgggataacatcgagtcactgcggggcagggaataaaggggacataaaggatgaatggctctgctcttggcaccctgaattcctacctcattgtgaggaaaagaatcccaggacactctgacccacgccccggtgggtacaacacagggtgagggggaatggcatgaacagggaatggagtggggtcatcccatgcaaacgtagggaggtaagaaggcccatggtcacagggccagcggggctggggcagccagagccaggctagagcagtctcttcactccatcttctccattccgctgtctgattccagaattcaggcaagccaccagtaagtttctaaggctatctatggggggtgagattttttttactcagaaacatctatctgctatctcctgggtttcacatccccatagaaaagtgagggtaagaagaaatggaagagaaaaaaaaaactaacaaagaaaaagtcttgtttcctgcctgcctccctcccacccagaggcgatttcagcttctgatgttgttcaggaaagttccggaaggaggggaagctggtcagcaacagtccactcacctgcccaggacccttcaggcactgcacagcctgcttgtgggtgaggccgcacagaatcactccatccacctgcaggagtcggtcacctgggaaagggatagatgtcatgtcatgacctggtgcttgaggctgcaggaggttcccttccaggaggaccctgcccggcacccctccatgcagcctggagaagtgggaaaggaagctgaggtgccaggtgtccccctggagtcagcaggaatcctgcctctctgagcagtctcactcccttcttctcaggcacatcacagatcagggatataaaagcctttctattattggctcacagaatggttgagccagctctgttcaaccttatccttcctcctgttttcctgtgaaaccgtttttgaaagtattttcaagtcacttagatatttatatctccaggatgtattttttttatttcaaaaaaaggtcagggaggcatggttgacgctggggacaccagaattctaggggaaatggagataagtaagatcctaggttccccttttggctcaattctggcagttttggagaccaataaaaatcacccccttccatcagagaagtgggagctgagcaagggcaaacagaaggctcaggtgtcctccccggatgtgcgagtgagtttaccgaggcccacttgtcctccaagggaagcagtatgttttcccatggaggccaaagagcaacacaagtcttttaagtcttctactatttttctatcacctatgcttcccagtgtgccactgcagaccccccaacctatcaaatgggcagggcagattctatcacctcctttccaggtgagaaaagtatgacctggggaggcaatcatttgcatgagttttcagaatgggagcagggcaaggcctagaggctgcccctcccagtgcagggctctttacaccatggagcacagagttcccaatgaggacccatccccatctctcaccctgtaggatctgcccttccttggcagctggtcttccaggaacaatggatttcacatagataccaccatatggcacactggtgttaatgccaccctgaaaaacacaacaaaaaactcaccacccatctttcctcctccaggaagcctccccaacctccccagctaagggaatccccacctgcccaccactctatcccatgaccttacctccgactggcactgtcttctgtattcacctgtttgtttagattgtattctccactgagcaataagattaggtgttcataagcttaacaatagcaactatgtgagagatctgggcatgtccccagcccaagcactggtacaaggcaggtgctcagcaactgctcacgtgggatgcaccactatctctatataggtagtgaccagcgtaggtggatatggctatgggcctgaaggcttgtgcctggcacgtcttgtgtgctttgatgggccaaaggatatgtgcatttttcattataatagatgttgccagattgcatccctatgtgaatatggatatacttattcacatttctaccagctttgtatgacagtaccatttttctacgttccaccagctgtatttggccaagctggtagacataaagtttaaaattttattttaatttaatttgtattcctgtggcttttcacgggtttgagtgtttttcatgtgtttaatggccatttggatttgagtgagacatttcaagaattatttttgaaattaaatatctgcaaagaaaatccaagtttttgccagccaaaggaaatcatcaacctcttctcagcaaatatatatttgtgaataacccaaaatttagtcagtttttcagatgaaaaatagctatgtttggtgtctgataaggctgttaccccaagccaagaataaatggaccatatttggtatcagcctgttcactccatgtggattcatgagccttattgcttggtttcttacttggtcccttaaaatcatctactgatgacaaattcattgcaggcttagggtccaagaaaacacatatccttgctctaggtacatagcattatcacaggggaaagcaaagaatgccctccattcacatatctcttgaatttcctctgaaaattttcatcagccatagagtgtccttactttggtgggagatgccattctatttcccatcaacagttaaatccaacaatgacattcctgaaatccagacccattccagggtctgaaggtaatggatcacttttttttttttttttttttgagacggagtctcactctgtcgcccaggctggagtgcagtgttgtgatctcggctcactgcaaactccacctcccaggttcacgccattctcctgcctcagcctcccgagtagctgggactacaggtgcccgctatcacatccagctaattttttttttttattttttagtagagatggggtttcaccatgttagccaggatagtctcaatctcctgaccttgcgatccacccgcctcggcctcccaaagttctgggattacagtcatgagccaccgagcccagcctgtaatggatcactttcaatactcagtaataaaagcagcaccttccaacctctgacctctggattttcaccagttttgtgtgtgccattccccaaccccttgggtaaacacagttatatgggtaatctcctttcacaagggtctaccaggcagagctcagaaaccaaatggaaagtgtcagtcctgatggaggcctggccctgggatgtctgagccagaggctccacactgattctatgctggatgacagtggactgccccacccatccttggccagatgacagtggactgcccttcttacctttagcttgtgtccctgaagccccaatgtgcttctctctctctgcagtccagcttgacctcagagtcaggacacatcagccaactctgcccacactgcctcctcatgagtttggagtcccctagtgcatgccctgctcatcctgaggttccccagtacctctgtttgtctctgaactcatcccccagtgcaggcccccattggcttttttatttaccccttacatttgtgcaaactaagcacactgtcagaggttgccatctgggtggaatggccaccaggttctagacggacatcttgttaactgcttttcaagctctcctaaaaactcttacagttacgctgaatccaagtgtcccatcttctttaaccagttccacaaagtagatttcaccagcactgatttctggaggtgatggaggacaagaagaaccagcaccctgccataaacaaacaaacaaaaataaagatgggatgaaggaagatgtcacctcttggctcatactgctctcaggagcaggcagcattgcacctcagaaagatcatgagttttggactgggccagcaggggattcatttccagctttatcaggccttctgcatgtgacctcagacaaagcaggaggaagatgagggagtgatgggctgggctgatgccacttctaggcagagaatgcttgggtcactgttcatgttccgctgtccctctgcctagaagatggggtcttttgtcctatctgccccctttacttagtgctttctaatcaccatgaatgttagaaaattctaacgacacgcaggaaaataaacaagctggaggaagctgaacaacgaagcctcaactgctgaggttgagacctgaagtgagaatctaaagtccaccataccacagaggatcatctggccacaaagttggccaagagacccagaagagcctgcagcatctgggttgcgtcctacagcctgcaccatggtcaacgtggccttagagctcccttgctcccctcaacggcccccagccccaggaaaccaactctcaggtttgccaccaaagaagccccagcatgaaggcctctctgctctgcttcctgccagagaggacctaccagaggaaggcctggggtgaaggtttctgctctggaggccaatctgaatcccagctctgtcccctgctccctgagagagcttgggtgtgctcctttgctctttctgtctcaggtaccccacccataaaaggggttgataataggaatgatctcattgggttaccatggagcttccatgagctaatacatataaagtgctcaggacactgcctggcacacaggtaagtactcaattaatggcagctactatcgttgttcttccactggcctcctgtatccagttcctcatgggatgttctgtccaggtgagcaccatggccaattaggaaggcactgtcattcatggagccctattgcatgccagatccttgtgacagaggtcaagacacactaccccaaaatagggcaccttggcacattggaggaattggagaaacagcacatgagggaaggtttctctgaccttcccctgcccttctcttctgaagcaggccctaaaacctaggaaggattttctaatcttcccccgaagcagggcacaagaccctcaagtgagaatgccctccctatatctggaaaaatggagcatcttatgtgggaagacacagggactgagagaggaatctgaacaagcaggccctgctgagttcctcccaccttacatactcctgctttttgtcttatctcatttctccatgactctccattcttcatcaaatatactcagggagaactgtttcttcaggtcatttccgtaagaaggctcacatgtcacataaaacttatagtaaatacacgtggatgcttttctctcattaatctgtctttagttacaggggtcccagctgatgaagctaagatgagtagaagaaagatacgggttttatccccgacactgggcatagtaccttagtttccacggctgtggacagacatcattatctccatcataaaaagagaaacaaggttgaaagaggtgcaataacctgcctgtttcaaccagcaagttgtcccagcaagaatgagaagggcatacactcagcctgagtaagggaggataggtcatgggagacctgttttcaaaggtcttgccagcctttggagaaaccagtaatatcagttcagcacctggggctagaaacactgggtgctgtgaccacccctgagcctgaagggcgagagaagggagtggtcgatggaccctcataggagctgtgctctttgtagaggggcacaggcaacctgtgtcagcacagggagagagtggaatgaagggtgtgcaactgagactccagcactgccaccctgtcctcactcatcccacaactgcgggctcctgctgaggctttgactgggcagaaccaagcagaacacagcaaggtgactcagtccatgagcaccagctgtgcagggcccagagcagaatggagaggctggggcatgggtctggcggggcctgagaagacaacaccactgggagtccaaagagacggcagaggacagcagagctgggactgaagcacacagccctccatacacctactccagatcccatcttcttcctccatggggtatggtcaagagcaaagccactgagttcccagcttgaggaccaattcaaggacaagaataggaggtgcctgattgcccacgccttgccattggcagcaatcaatttcctcatggtgctattatcacaacaattataattagtgactaaagactccagaggcacccacactgagcctgtgcccagacactgtcctagaactctgccttcttctatgcgtttttctcaacaaccatgccatgcaggcatttgcttctgtatgcaaatgaggaagctgtggctcaaacgggctaagtaacttccatccacctgacatggaaaacagagaacaggaagggcctaggggccaggctgttgggcttcacagtctgttctctttcatccagatctagaaagtaaaccaagggatgattacctttaacggcagaaaggaaagctgatgtctcagcctgggcactaagctctgcaccccagccatgtctagttcttcagtatttctgtcctggtcttgtgtgtgtgacaacaaacttccctggtacccgaagctcaggatgtctgtagaggagaccccagaattggctgtgctattcttttcttcatctgggttatttccaccaacacctataaaaacaagccaagaaaaagtcaacagcttaaaaaggctggtttcttggtggcatctctatgtgggcacagcgttttcctccagtgacagagtgatcgtttatagctgctcgggtacaatatgaatttagctcctcctgaaagatgttacatttagattagagaaagggaagattctacatgggatttagaaacctagatagagcttacgtgacccaactatgaatgcgtaggctcaaaagaagttcataaggccagctatcccttattaagctctagccatgtgatgggcaccttagatatacatataggaagatatggacatcttcccatcttctcagcaaacccaccaggaaggtgtaatcccagttcaaacatgagaaaacagagtcaaagctattaagtgtcctgccccaaatgctacagccagcatgtgggaactgtcttaaacccagcctctcctggacaccccactgagcacatctgcagccaccatgtgatccaaaaaccaatgtatcaggtccttttgggaggcttggtaataaccaaactgcaggcccctgtgagtgaaagctaggccactgattcctgctcaccctgtgtctgactcgtgacctggcatagaacaaagaaaagaacgtgaggttgctgatgtttatacattttgcatgtaattactaccatagaattatacacttaaaaatttttaaatgatgtatgtatatcatattgaaattttaaaaagcaaacaaataggaggtgcctaagcttgactcatgttcattaatttgctgacccctttattatggcagtggttaatatattttagaatttaaaattcacttaaaatatgtgttaaaagacagattgctgtttccttagtttctgattcattcatgctggaatggtacccaagaatttgcatttctaatacatttatgtatgatgtggatgctgttggtctgttgatcacacttaaaaaacttctagactacattatgcctaaaacagttcctctgtctcatcagtgcagttgtttaattgatttgttttttttttctccaagtaaagagattaagttattctaatctaataacatgctaatatagtttggctcagtcaggcaaaatcaatcatacatatgaaatcattaacagctgaaaagaaatagagagagacaaagttgggaagagattaaaagtgagagctgatgtgggattgcctggatgcaactaacatcccagttccatcacctttctcctctgtaacactggaacaggtaatgaacttccctgagatttagattcccttgcctgtaaaggagaataaataacaaaaattcctcatagagtattttgaggattacatgggatactgcttataaagttgctagcaaaatgtctggtacataacaagtcctaataaacagttacagatgaaaaaaagatggacagggaataacattcatgacaaatcaatctgaaaaatgttgatgtaaaaaattctagaactcaggatatcttcacaaagtcggtgtattaaaataaatatggcataaaccctccaatgtgagccttataaaaagaggagatttgcttattatgaaaaagagaaagagtggagggtctatgaggtaattattaatattagttttattaaatattagcacatttcattaagtgtgcagcaacctcaagctggtgttattaactgaacttgggagaacatttgagctcatgaactattcacattgttctaaatctaagtaaaaaagtgataaaagagagagtgcagaagctagttaaaatgtgttttccatatatataaatatacataatatataaataaatatatattatatataaataaacataaataaatttaatatttataaatttaacatttataaatatattatatattatatataaataaatatttataaatttaaaagttataaatatattataattatatataaatatttataaatttaaaattttatataaaaagatataaatatatatgtaaatatataatgtataatatatctaaatataaatatatttaataatatataatatatctaaatataaatatatttaataatatataatatataaaaatgtaaatatatttaataatatataaatagattatatatatataaatgtagctaacagttccaacaatgttcaaataaggcaaaggcccagctgcaaccaatccagttgtttctgtacctcactttccttttgctgtccataaatcttcttccaccacgtggctgcgctacagtctctctaaatctcctgtaattctgggcgctgcctgattctcccatcgttcattgctcaaactactttaaattttatatatatatatattttacacaaagaataggctgagttaaatatacatcttgctgtttgcagtgaccattctggcttatcattacagatgtcttgttttctcctatagaagtaacacactttactacttttcaagacagattgttacactgattctatgattgtcgttaagagaaaaatttcaaccaaattaaatgtaaagtagtatgagcaatgaatgatgggagaatcaggcagcacccagaattacagcacatttagagagactgtagcgcagccacgtggtggaagaagatttacggacagcaaaaggaatgtgaggtacagaaacaactggattggttgcagctgggtctttgccttatttgaacatggttggaactgttagatacatttggccaaaactcagtgattggtacagatgtgggctacagttggtttacaacttcacttgttatagttcacgatgtatagaaaaacctttaggttgaactttaatatgtaaggaggcagctttaggctaaatttgatttaacaatttccctctttgggtcattttctcaatcttgagatattgaccaaaactttagttattgatgttactattaccatggctcttgaaacttactgggaaagagcagaacagtgagtttggcaaagatgggaacaaggaccgagtagagggtatgtccatatgttggaacattctgtttacagaagaaaaacaaaacctggtctgttctagaatctgtttgctatgttttccatgatcaaacgtagtttgattatgttacattcagcacaagcaaccccagttttgtctggtttggtctgttggggcctagtgcatgagctcagtccaaaacaatggcctcccataatttcatttaaaagaatccccttttttttaggtcatgttctcacttaggtgagagtgtgaccaaacttagggccttagcaccactctcagttaccatcattgtggatttctggtctcagcatgtcattcataagttacggtgtcctcatggctgcacatttctttcagctcttgtcattccagttaaagagagaccatttgacatgctagagatgtctgcatgcaaacatttaacacttttaaagagaatatagcacaccagaaagactattattatgactatcagtaggataataccaagagtttggagtgtgctccttacccggggtccccataaaccaaaccacccaaaattaaatagatcaaaggatgagctacatgaagagtctactcacttaactaaagagtctcggccgggcgcggtggctcatgcctgtaatcccagcactttgggaggccgaggcgggcggatcacgaggtcaggagatcgagaccatcccggctaaaacggtgaaaccccgtctctactaaaaatacaaaaaattagccgggcgtagtggcgggcgcctgtagtcccagctacttgggaggctgaggcaggagaatggcgtgaacccgggaggcggagcttgcagtgaggcgagatcccgccactgcactccagcctgggcgacagagcgagactccgtctcaaaaaaaaaaaaaaaaaagagtctcttcattaatcccctacaactaaatctataatatgtgatgttttccccataggccataagtgccagcagctgtacagatacttctgtttagctagtaacttatccagatcaattctattatttagcataactttcacaagagaatttaaagtttattgtgtaaccatagcctttacagtagaatctgctttagagcctatcatgaggaatacatttttaatctttgccgcttttattccaaactatggaaaaaggacctaacaaatgatgcccttttagaagagtgaaagcctcccagcgatgttctccttaacccatgatgtgggttaagaggagtaaatcaatgttctgtttctgactgattatgaggcaatgtacgtaccattaaagtttctcatctacattgggccttcatttttgtctattaaggtataaggttatccatgtataaggctggctgcaaaatccttcacaaataaaagtataccccataaatgcacacaagagaaccctttcacttctattattcatagaagcataagcaagggacaaataatcaaagataagagtctcatgatagtagagaattcttgatccatgatcttgggaaaacctgttcacagtcaaggatgccatcttctggggagaaacccccctggttagcttttctttaaggcttctaatgggtgtacagttccaagagtgtaaagggagccttctcagttgtgagattatgaacccaaggttcaaggtcctgaagttttactgtagtgtgcatgccaatgacagtctttctttgatgttctcagaagatcagtcttcaggttctagtttatgaaggcattgattgtcctcagtgaaccataaaaaccttactttacctggtaaaaatacactgtagtataattatctactgctacaaagatggcagtggcaccccatctggagcagccactgccgtcacatcagctacagaggtgaaacatggtaaagagctggatacaagtgggaaacatgccccttctgagttggtggagttagagcttcctgggaacagttgcagcagcccaagtagtggctgcagatctgggcctcccattccatggagcacacaggacacctgtccttcaagatgcaactacagatgcccaagccacggctgcagagtcaggcatctctacactcttgggggcacaggaaaaaaccccaggcccttgcagacttggaggtatcttctgctcccattgcctggctcctccccactcttgacatctgctctgatcttggagcaaggttgtgggtaggctcaggtgctgttgcagcctggtgggtgtgcacatgcttgaggcagtgctgatacaccagtaccatactgtctctggcccctgcccaggctttgggcactgacaagcatgggagggaagctgaggagatgctgagggcagcttggcactggcctgcaggcatcctttggcacaaatagcctgggtgccatgaatggcagcaggaggcagacaggctcctgcacagaagggggtgggtccttggtgaggcctttccttcaggccaggatgggtgtgaaggctggggtctgggctgccagtcccgtgaaccagagtgtaaacttgtgatgccttttctggggccatccatggcctctcatggaccgatcagtgtgcatttcttcctttctgagacctataaaagccccaggctcagccagaactgagcagacattgggacaaccagctacagagagcagctacccactccagggcctcatctcttctgagagatgcagatattgggatgcccagctgcagaatggaggtgcccactccaggacatcctctgagttattctgtcactcaatatagctcctctttgctcactctccacttgtctatatacctcattcttcctggaggtagcacaagaacttgggacttgccaaatgacaggactaaaaatgctgtaacacaaacaaggttgaaacatgccccttgctcaccatgttgtggatgacaagaagagagaagaaaaaaagagctgtggctctatgggaacccagacctgggagctccccaggccagagctgtgactcccgctatgggaccctgtggttcctggagtctgcaagcttccaggtacaactgtgttcccttgtaacagccatggaagctgcttgtggtgtgtctggtccagccaaagccttatagtgagctagcactcatgctggcacctggagctgcctgtcccagctgcagcagctggtgtgcctaactgtgttaaaatatattgaacaatatgaacttccactcaccaagcctgacttgattgctcagtctaccagtagcagaggacaatattgagcccctgatatggtgacattccctggagtaatcggctggctgcctgggggcaggctgattacatggtatgaatttcatcatggaagtagcagcattttgttcttataggaatagacacttactttgaatacggattgccttccctgcatgcagtgcctcttcccaaactaccataagagacttacgaatgccttatacactatcacagtgtatcacacaccattgcgtgtgatcaaataagtcacttcctagcaatagatgtcagcaatgggcccacgcttatgatccaatggtcttaccatgttccgcatgactctgaagcaattggattgatagaatggtggaatagcctgttaaaaactctgctgcagcaccagctaggtggcaatgtcttgcagaattgggacaaattctccagaaggctgtatatgctctgaatcagcattcaatatatggtgctgtttttaccatagcagaattcatggctccaggaatgaaggagtgtaaatgagagtgacagagttcactattacttacctgtagtgactcagtagcaagatggttgcttcctgttttcatgactttatcatataatatgagatgtactgaatttgtttcatagtatttaagtaatcctaattttacatcatagtatttaagttaggggatatcaagaagagtaaacattactcaatgactttgcttcctctttctgggaagggattagtgcaatttttggtgtatacaggatagttgtatcctgtcaggcagaattatgaccttgctattgtgtttatttgaaaattaaatatggttttaaaagatacatataggtgccacattgacacagaataaacttataatagctagttttatgtgttggcttgactaggccatggagtgctcagatatggaaacaaatactattgagtgtatctgcaaggatgttctagatgagattgatatttaagttcatagagtgagtaaagcagattgttctctctaaagtaggtaggccttatccagtcaattgaagacctgaatagcacaaaacagttgattaagggaggactcctcttgcctggcttcctgagctgggccattggtcttttcttgcttttatattcaaatggaaacatggattttctcgggtattgagcttgccagcctttggactgaagcttacactatcaggtctggttctcatgcctttggactcaaactagaactaaatttcagcttttctgtgtctccagcttgccaattgcagatattgaaacttatcagcctccataatatgtgagccaatttcttgtaatctctctttctctctctctccctctctctctctctctcaatattgagagcagtatacacagctaagatagtcatggaatggacatgatgactctattactcaatgttatctagagaaacatatgatgagcaagaaaggataagaaattggctcacaccatccttatagaggctgagaagtctcaatatctgtagttggcaagctggagacacaggagagattaaatgtagttccagtttgagtccaaaggcatgagaaccaggagagctggtagagtaagattcagtccaaaagctggcaggctcaatacccaaaaaagacaatgtttctatttgaaacattgaaaaggaatcctctcttaatcaactttatttgtgctattcacctcttcaattgattggaaagggctacctacactagagagaacaatctgctttcctcactccatgaatttaaatattaatcttatctagaacatccttgcagatacacttaatatcatttgtcagcatatctgggtacccatagcctagtcaaatcaacacataaaattagctattataagttcatcccctgtcaacctggcagccatgtgtctcctaaaaccatacttaattgtcaattaaagaaaatagcaaggtcataattctgcctgatgtgatacaactatcctgtggcaaccaaaaatgcactaaccccttccctagaagaggaagcaaagtccttgagtggatgagggctgcctactttgaatatacatggatgtgtataaatacacatttttttctgttcctctagataaccttgactaatacaatcatcatgttcattccctgactatcttagctgaaacagagactaccagtcagtactcttattgcccccgatttgtttattgaatgtacttgctaaaatccaaaaaatacaaatttacttattgtctacatcaaatataatgcaatcactatgggagtaagtactttgtatctctttttacatcacagaatagattgcataacataaaagtgatgctcaacaattacttgttaacctagttttgattaaaacattctgtagagttcaaaaggttctatttttgcatatatgttccctttgtttttataaataaataaattatattaacttaaaaataatggatataatggctttgaaaattctgagactcaccagatggcaaatgatgctgaaatgaataaatagctttcaagcaaagatagaatccagggcactgccaggaaagtatggtccaaaattgtagccaaaaagataactgtaaaattttccatatgttgcaggaagatcaaaggttgtgctttggaatgccatttagttagacatacggtcctctaaaatataaagtatatgatatacagataactcaatcgaacaatggaacctgcaggaagctcacagcattgctctgcagcctcctcaacaaaagttcaagaaagagaagggcatgtttctgaaagtattactgagttaccctttgtgtatgagtgaatctcagtaagattcacagtaaacctacaaaaatttgaaggtaaattacatatgtaaaaatattgataatttaaactgaataagccagattcattttaaagtgggccacccaagtttctttaagcagatagcaggctgagtaaactactcagagttaaatatgttctaacttttatgaaaaagtaggctatttcaaaggataggactgagaccagacggtggaatcaagaaatagccattgattggtaggaataggattaaattcccctcaaaaaaaaagaaaaaattaacattttcccagctagatttcagaactctcattgactgctgacttctgtatgtctccctttttcctctattaagtccgagtgtctatgatgattattctatgcctgtctcatcattttatgatagatgtgtgaaagataggtaagttgtttctttagtttcaaaggtcttcaaatcaagacaaactgtactcaaggagttgtatttgcagctagacctgatttaaatgacaagattctagacttcaaactaatgctgtgatgagatgaagctttggtagacttaggatacaattagtgaggtgtgtgcattacttggagccagagagcagtctacagtaaccggcctctaagaaggaccccaatggacattacctccaggtattcatgcactggtatagttgcctcccgcagtgtaccagggttcatctatatgaccagtagaatatgccagtagtgatggtatgtcatttctaagatgatactatttggcactcaagggttagccttctgggaaacatagagtttgggattttaaatttagaaactgaagcaacttttattctggtagttacatgctctcattactgcttctctctatatatttctaataataattaatttaattaaatatcttcttcttctcaccatacaattttttcatattttactattggtaatgattttaactactacagatgtggtctgtatctatctgcctatttatctgtgtctctacaagtgcataaatgtgtgtgtggtgtgtggaggggagtgtatgtatatgtgtgcttataagttcatggatgaattacaaagctttcatatgtgcatttcagtttactcagaagttagcaaatttatttttggacattttaacctctgtattactatgaaaagatccacatttccattttcatgtaatctctttctttctccctctgtcacacacacacacacacacatacacacacacacacacaccccccacactccaaacaattcttcatttgtgtagatttgtgtattaccctcttcttggttttgtgtctctaaattatttacttaaatattaagttagttaatttaattgtgttccccctctataatttccatatacggtttacctttgaaccatataggtttgaactgcatgggttcacagatacatggattttcttctgcctctgccatccctgagacagcaagatcaatccctcctcttcttgtgcctcagcctactcaacatgaagatgatgaggatgaagacctttatgatgatccgtttccactcagtgaatagtgaagatcttgtaattctcttaataacattttctctcactttctttattgtgagaatgcagtgtataatacatataacatgcatgacatatgttaattgtttatgttattggaaaggcttctgatcaacagtaggctattattatattaccagcagttaaagtcaaaagtgatacagtgatttttgacttcatagaggtcagcaccctaaccactgtgttgttcaagggttaactgaaaacgcactggattgcatgagcataagataataatgagaccttaactactttccagctgaggtaggggaatttaaattctgcataatatctgctgtcaatagatttgcccagtaaagttttgtatcaaataagttctaagtcttatttcacatttttatctcagtttctaaatctgccattattacattggatttaggagcaaaatccattataaaaaacctgttctaacaagaagactgttttttggtagtctcttaaacttcatattgggtgaagattatgctccttgaggataagattcatactgtaacaattttctatatcctccacaatgttttgcagattcaataactatttaatgaattaagttaaatttacctatactcttacaagtcttactctcataaataaccttctaatccgcaattcctctaaaacatacaaaaaattgccaatataaaaaagcaagaaagaaggtgttaaccattttgtcattcaaaatatgactcattctttcttatacaactacctttgtcagcattcttgccattggactgtctagcctttgacactgttatatcatggcttgtcgttagagaaggtaaagtttggaaaaaagaagcagttacgtaaagcaatgttagaaaatccttgagtttcccttagaattttgtgtcttctacgtgttttctatttcacatagattaagtttgcagagttgtgtcataatttcatgagtgtatctgtcaaagagccctttgaaggcctatttaatccaactaagaccattttttcttgttttaataccattaatcttgttctctctttgataactgagggaaaagagaaagacattccatataatacatcagatgcctaagtgctttggatagtcataagccttttctcctatagcttcctaattagaaatgcctgctctgcggagttttcttaagttttccaacttgctccttccattttataatagtctattgaggaagactattatcaaataaaaatcagaatgatcactggacacctattttagccttgggatttatatcacaattccctaagacttcatatttccagaaaagaaattcaaactaaagctcacaattactattattatggtaatcctgataagatgtacattttaactaaaagaagttcccactattttttttctttctacttttcaataatccttgggaccttagtaggagtgtgcaatagtcttgtggtgtatttttagtttaaaagtctatctgattaccacttggtagatattgtccaaactcacttttgaatccaagtgtttttacccttatataatttttttaaaagagtatttgcttgtttctattatactataactattggagctactaggaggccttttaaatttcaacaacaaataggcagaatggagactaactgaagggttgatgggcttaaagaaaataaataacctaacaaaggctaatggcaaaaccaacattagaaaccaagtcactttacttgggattagtggataccaaaatgtgctttctcggaagcagcactttacaaggaaacatgaaaatccacctttgttgtccttcagctaaagggaataaaatcgtgtactttctgtaattttaaccttgttataacagatgctacagaaactcaagtggaactctgactgccttgagagctgaataaaatgcatcctaccatccattgctgctgcatcaaggtattaaaaagagagacagaaggaagaggcgagagaggcacaagttcaacagtgtgagggacttggacacaatgggagggagaaagaaataaatgtctaaatgtcatggaaagaacagacaatgaaggcatatgtaagaggcctgctaaagctatgggacctcagaagcctatttgtaagaactacaatttagaataaggaacttgcaatacaatgcctgaccttcatttccttacgtgcctcaatcttgtcaaaacctttgattgatttttgtatgaacatgaattactgctacaatactcagttgaactacatgaatttctcaaagcagtaatacagtgctatagcgtagcttaacattgtttaagtaatatggtttgcttatatttaagtcatttctaagggacccatgcaaacacagtcaggagatctatttctgatgtatttccaaggctaaaaacaaaaaatgctgttaatgcataaacagtcaaaaagctacgcattgtggttttacagggacttctatttctaaagatgatggttgcatgagggcctctgcctttataagggaaatgtgtagattttaactagctctgtattataatgtttgtgttttgaaaaagaaaagcatgtttctgcactaaaaaataaattcctaatcaaacctttaaagttaacatttagaacagggacagaaatttctattgtttcctaagtgttttgttgctgttgctgtttagatttaaatcattttttagaagttttactgaggcataattgatataaaaaattgtacacctttaatatattcacttggatgagtttggacatgtgtgcatacaccaataccatcatcacaaccaaggtactgaacatacttattcacctccaaaaattttcttttgttcttttttaatggtggtagtatatttttaagaattcagcctttgagcagggtatgaaggaccttcaacaacaaatgcaaaagtaaatgagctaagttcatataaagggttagctctcagtgagatattcaagttatgatcatatcctcaagaggcttgtaaactgactgtgggtttccagtttggttattcacagataggccttcatttgctcattcacctattcattcatatagccactcattcattctcaagaagaggtatttgtccatatctcaccatgtggatgagcagatggtcagttctcacttcttttgccattaagtgtgctcaccgttgagctccaggatggtattttctctcactttgcgtcattaccaaagtggctatcaagattccctcccctaccttctttttcttttttcaatgtttaagagctggagttaatttcttgactcctttggtaacacatgccgatatataccactcaaggcctgttggattaaactgttaaatttgtcatctagctaatgttttctcagaaccagacaaattaaacagagtcaattgttgaaattatttcaaaagataaacaatcatagaatggaaataaactacagaaagtagggaacaggagtaactaagtctcctagaaaacatttgcagcagatgttaagtatccagtctcgttgttataaatgaatttcaaagaatctcatgaggagcagctttacaaaattttactgcactaacaaatggcagccaacatctgtagtaaacacaaaatactgtaccatcctttgtatctccttaaattaagccaatttctgcttacacagaaaatctgtctgtggaaaacactgcttagaatttgaaagcacattaatctggaagccacaacagaagtgtgcttcagaaaacttcttaatgtttttcttgtgagttattctctttacgcttttcacattacaatattaccaagttatcataatgtattttctgcactcccagagcaagataagactctagttgttgctgggaactatacattgtctaaatatgggttcacattctctcacagtgattctggaatcatacacacaaatgagatcactgctgtcacatcactggaattaagacaacctctctactcactggccatgtaaatatagatacagtactcaaatcctctgaggcttagctaattattggttgatttggtctacacttaccacattaactatttgaaaagattcattgatataacatgtactaagaacagttcctgactcataatcattattaaggcaatatttaccaatatgtgacattaaaatagatactactattagataataattcatactatacattcaatatttaagcaacagaattataattttgtgaagtaaattttgtactcaaatagaaaatctaattctataattattttctgcaatattgggtcatagaaccaacaaagaatatgtgactagcttagacgtatgtatttacttatgtgattagtaataaaattcttcactcattcctaggtttgaatcccagatgctctgtgtagcagctgtatagtcttagacgagttgcttaatctgtctgtacctcgatttcctcatttgtactccaattttcttatgtggtaaatataaaattacttaactcagagctatgaggtcagttttatttgagagaatccagaaaaaaaaaaaacttaacacacatttcctaccattcggcatgcataatacgtactcaaggaaattttagatctctgtacatgattaatatattaaatcctcaaaccgactataaggtctgaaaatgcatgtctttatgtcactgtacctctcattgcacttggcacagtgttgtgaatatatttgtcatttgtatgttctttctaccatacaattctgccactccaattagcatattgtgttggaaaacaattgagtgcttgccttatgttttactaaatttatatggaactacgttgacacttccttgcccttaagatgctgggactcactggttgctttctagttctcaggagtctctatgtgactctgtcctttacacttgccctgcaacatcaccctcagccctagacaaagccaacatcatttttaaaaacctgcaaatatgtctgcaattcactgtatgaatattctcattctatcaaaaccctgacctcactaactcaatggagcaatataggatgataaagtagtttatatgaaagtcatagaaagtttgctttgtttattcacccaaaggtatgtttttaaaggatgaggcttttatctgaaacaaataaaattataatttgaaatttcaaataatgtgactaatagattatgaattcatttccaaatatagaaataattaaaatacttgggggtatagaaaaagtgagtgctgtatctattcttttattatattaattttaccctagctgccagaatttagtacttttaacatcaactgagagatttaaggctattgtaattttcctattttgattttcctcttctatttataactcaaagtaatttgataatatacactgtgatgtgtccccatgtatcaaacatttaaaaaatatatttggaaccaaagcaaagatacatattttttttaatttaattttttttttttttgagatgtcacccaggctggagcgcagtggtgcaatctctgctcactgcaagctccccctcctgggctcacgccattctcctgcctcagcctcccaagtagctgggactacaggcgcacgccgccatgcctggctaattttttgtatttttggtagagacggggtttcaccgtgttagccaggatggtttcaatctcctgaccttgtgatccgcccgcctcggcctcccaaagtgctgggattacaggcgtgagccaccgcgcctggcgcaaagatatgttttactaataccacagaggtataatctgctgctatttcttgatcagaagtaaacaagtgtcttcacagcagttgatctaattttcttccccattcattcaatggtattttttgattattatagaatatattgaattagataatgataagtcctttttctttttttttcagaaatggcttctctctgttactgaggctggattgcagtggcattatctcgactcactgcagcctctgcctcctgggctcaagaaatccttcgacctcagcctcccgagtagctgggactacaggtgagcaccaccatgtccacctatataatttttgtatttttttttttttttttttgtagagacagggtttcactgtgttgcctaggttggtctcaatctcctgggttcacaccatcctcctccctcatcatcccaaaattctgggattacaggtgtaagccactgcacccagctgagaaggctttttattataggttgttcttattgttttatttagttggttttcaaggtaagtttgacatataaggtggtataatgtttaaaggtcaagttatagagatagctagattgaagttcaaatccagagccaagttacttagactctctaaggacttgttttttcccttataaaattaaaataaagtggatagccacttcataggtttgtaataagaattaatatgatcatgatgtcacagagttgcaaagagatactgaaacttggctctgccaaaaaatattagctattgccattatgattgttctccttaatacctaaggcatttgctgacaatcaggttactcatcatgtccttccaggaaaaaaactttaagaatgttgaaaacttaggaactacttttaaaatttaattttcagacctgacataacacagctgaggaagagaggtggtagctgattggggatagatgtagagatcattaatggtataagagtgtgagaatgtgaagcaggataggatatgatattactcatacagatcacaaatacatgtcaaaattatatttatcattcatttaagtaaaattcaacattgttttcttcaaagaagaaattgcgcatttcactctacctatttaactctggaaaattttacaaactgagcatgccattttttagtatgaattcctttatttcagctgccctgctaactttgcatgatgagcagaaaaaaatgaaacagaatggttagttctggaatatgaaaaagtatccaagaagaggagtagtcttgagaagtagggaacaggatgaagtcactaggggacagaagggtaggagggagtgggaccagacaaacactgagctctgcatgcacacgtaacagtctaaaatagtcatccagcacgcagactctaggtcaagataaccaagatgaattgcaacttctccacaagcaacatgactttgggtaaggtatttaacttttctgagtcttagtttcttcaactgataaataaaaatgatggtcatatctacttcataaaattgtgataactgattaatacatgtaatgaatagtgtttggcatttagcttaataataagacatttcattaaaatattagctacttttgttagctagcaactctcaattttgcctaaagctgaccccatatctagggttaggttttgaaagaagttcatcaccatcagaactaggtctggaaattataaaggaaagcttaaaaaaaaaaccagaaatatgtgcaacacctatttacaaagaatccactgggaaacccccattgagcccaggtagatggcacatgtcccctttgggcatgtaactcagttccctgagggtcagtatattgtctttgtttcaaaggtcccaaggcaaactttttaataattgtgatcccactcaatagtcatgttcacttactttgtgggtacatttgtggcatattttaaaatgtgaagttgagtgcatttcacttaaaaaccaaaggcatgtaatgacaacatgctatagaggaaaaattattgatttgtgtaaataggcagatcttgtttgtattctagctccatcacttactaattttgtgatatgggcaatttatatcctatctgagcctgtgtttcctctacaatatgagataatttctactttgaagtactgttatgagggttaaatataaattactttctggtttatgatgttggtatatactatttccatgcatgatagttatttttatgaataagattttaacagtaagccatagaaaaatacaatgtaagactgattcttagaatctatcaaaacaggttgtaaaaatgacttaaacatctagcatggcagtgactaacattttgaaaagcttaatttttccattgagaactgtagcccaacacagtgtctgtgcctcagtgttcctcttatcaggaaggataatatctgtgatgcatggactaactctaatgaaaatttttattcttaagacacaagatatttcccagcacagtacataaggtctttgtgctcatgtcagcattggagataaatttctgggaaagaagtagagaaaccgctcatttctatagacatcaaaacaccaaagtaaaagtgaaaataaaggtacgctgcagacttttttttaaatgcctaaactaaaaagtatacctatcaggaaacatccaactcacaaattgctttaaatatgtttttaaaacagtgtgcttgttttataaccacagattcatgctatttatctgatattcccaggtggttgctttgtggggctcagtgccatccttggagcaataaaaagcatttcttctacaccagtaaaaaactggctacttctcacataaaccttggagggcttccctcagtgggcttagtgatcagcaaatcatgtcaaataacccttttggttatttttgacataatagtgttcctagcaggcagtactcaagaattcccagattcttagctttaaattcaatatactctcttgtattaaaagtcaagctatttatccacagtagttcttaggtccacgtttcattttacacatatatgtggatgtaacagctttttccttagaactttttaaaaaaatggaattcagtaaaagtcctatatttgtattttctatgtgccaagaacagataaccatcattaatgtgagccaaatttgaattgaggagctgaaattaggaggaattgaaaaacacctgaaataaatcttcaagtaatgaaggggaaagtttactttagaattagtgtatcaaaaatgagaaaattggctgggtgcagtggctcacgcctgtaatcccagctctttgggaggctgaggcatgtagatcacctgaggtcaggagtttgagacttgcctggccaacatggtgaaaccctgtctctactaaaaatacaaaaattagccgggcatgatggcacatgcctgtggtcccagctacccgggaggctgaggcaggagaattgcttgaaccacggaggcagaggttgcagtgagccgagatcacgccactgcactccaacctgggtgacagagtgagactccttaaaaataaataaataaataataaataaacaaataatttaaaaaagtcattgctttatttttaaaaaagtaatagtttcaaaatgtatacatgtaaaatctaactgggaatactttgtacctacttgtagcccaagattaagtttattctcaattactaggaggtttgcacaatagagtacatatttaatctgtatgactaaaagcctcattgtcaatgtgactgtgtcatcattatcacatttgtgaatctcctgattataactttcacagatggtctatctacagggttctgggataagaaacttgctgtctgtctacagaggaagctgttttcacttccagatagttctgaatatttgaaagtacttgctgattcagagtcaaattatgtcttgctgtaacatccacaatttctgaacttacatttgagataaaccaagattagactaaaccatgccttcaagtgacagactctcaaaaatgtgatgtattttttttcaaaaaaaactgcacgtccaggatactctacctggagaaaaacgtagctctcattaaccttgtccagacattaaacttataagagaaaatcattattttccttgtagccaaattattccgctaaattgtttttaggcaggattaataaacctttactgtaaagggaaagaggctaagatcttaggttttgtgggccatataatctctatacaactattcaactctgctgttgcagtgagaaagcatttatagacgatacacaaatgaatgagtgtgtccatgctgcaataaaactttatttacaaaaccagtctattggctggatatggcttgcaggccatactttgccaacccttggtttacagcctggctagctaaacactgcttgttgtagtaaaatcttgctttttaaaacatatgtctctcatcctagcattgtcattacatgtgtgtggtttattgttgaatatgtaatatttaaggatctttcctatttagttttattgactaaaagctgtttcataattataatacacagacatctatataggtttttattttatcattcaacctattagctaatccttagagttgtttcaattttcatgtgtttgacagatgaacatgtctaaaacactgatgaaaatgttaccagaatataaacaaaaatgaatttttccggttaaaaccattttacttgttagtaatatgtaactattaaccattaaataatttaccaaattattccattacgtaatccatattgctccttcttgtccacaagaatatagtaaggtacattatcaaatacatacctctgactttagtgggcatttaatgtattattagaggatcccaatatctgtctttcttaagaaaattaaactcatccctagtgattatacactttcttcatctaacactataatattaataacatttgaaaaaataatgtctaataattaacactagatttagagtatttttagacaattttctaaaattatctgaaaaatttgaccagaatcattgtaaaattcacatctgagcttatgaaagcccactttattccactctaaaagaacaaaattttgtacttttaattttatcttttaaaatgttttaacataaaggtagtgggagacgttactaaaggaagcttaggtagtaacgtatttgtcgtctcagttaacacaaagaccatagatggggcagatctgcaggatgcaaaaactttcctttttctcacctcatagtagtcatatggctactgcaattctctggtttcatgtgcttacaaaatgtcctttagttaaaaataaaaagaaagagaaagagaaagacaaagaaagaaaaagaaagagaaagaagaagaaaagagaaaaaataatttcttcatgtgtctatttaaattaacaaagacgtgaattgtcccagacctccctgtgatgattaatttcatgtgtcagttttactgggctaagggttgcccacatggctgataaaacattatttctgagtatgtctgtgtttccagagaaattagcatttgaataggtagactgagtgaagaggatcatcctcaccaatatctatgggcatccttcaatctcttcagagcccaaataaaacaaaaaggcagaggaagggtgaatttaatctgtcttcttgagctgggacatccatcttctcttatcctccaatattggaacacctggtctatgttggtaggagtgtaaattagttcatcataaccttgttggcactagggaccagtttcatggaagacagttttttcatggaccgtggtgtagggaagatggttttgggatgattcaagcacactacatttatttatttatttatattattattatttttgagatgaaatctcactcttgtcacccaggctggagtgcagtggcgcaatctaggctcactgcaatctccacctcccaggttcaagcaattctcctgcctcagcctcccaagtaactgggattacaggcacctgccaccacacctggctaagttttgtattttcagtagagatggggtttcaccacgttggctaggccggtctcaaactcctgacctcaggtgatccacctgccttggtcttccaaagtgctgggattacaagtgtgagcaaccatgcccggcacaggcacattacatttattgtgcactttatttctattattattacattgtaatatataataattatacacctcaccataatgtagaatcagtgggaaccctgagcttgtttttctgcaactagaggtcccatctgggaatgatgggagacagtgacagatgcacacactgcagggggattgcattagatcatcagacatcagattctcataaggagcgtgcagcctagacccttcacatgttcagttcacattaagattggtgctcctatgagaatctaataccaccattgatctgacagcaggcaaagctcaggcagtaatgcaagtgatggggaatagctgtaaattcagatcaagcttcgcttgcttactcactgctcctactgctgtgtggcccagttcctcaccaggccatggacctagtccatggcccacagggttggggaccccgatctaatgtgacaactctggaaatcagattctataccccctatttgttgttgctgttgttgctgctgttattgttgttcagtgtctaatgagctttctgaaataattttgtagtctgggactactcttcaacactcagccaggcagtttacatctctgccttagccttcacttcctgcttgcccagagcctcaaggccagtcagaggtgagagctttgagccttcccaggtctttactgaacatgtacgcaggcctacacttgggagtagcctcatagatttctaggaatcattctgttggaattttcaaagcccttatggacatctcattctcctgttttacttttaaagctttttagttagcctattgtctgcccaaaatgttatctacaacctcatacaggcaccaacttgaataacggcctttaaatgtttttgacaaatgccattaaggaaaaggctttttcgttaagtgagctcttaggacagaaaaagacatcctggcagtgggatgtttctgaaaaccaccagccaagtcaaatgacagttctctgggaatgaggctttgaaggaaatccagccccattctgtctttccagtggctgccaggctattggtcttcactgtaattatgggctgttaattttcaaggctgcagtggagccagcgaggagaggatgagaatagaatagggcaagttaaaaataccatactgcttgctgttcttaatgagatttttcattttatttatttgtgtgtgtgtatatatgtacacacatacacacacacacacacacacacacacacacacagtgaatggaaaataaatcttggggccccaaaatcactaagctaaagggaaaagtcaagctggaaaagggttagggcaaacctgcctccaattctattcaaagtcatccctccattcactgagataaatgcatatcggattgcctcctttggaaaggctaatcagaaactcagaagaatgccacttgtctctcacctacctgtgacctggcagccttctcactgcttgtgctgtcccacctttcttggcaaaaccaatgtatatcttccatatattgattgatgtctcatgtctccctaaaatgtataaaaccaagctgtgccctgactaccttgggcacgtgtcatcaggacctcctgaggctgtgtcacaggtgtgcctcctcaaccttggcaaaataaacttcctaaattaactgagacccttctcagatattcaaggctcacattttggcaaccatgaagggattctgggtggaggctcccctgacctttgacaaatctcctatcagtgctcggtaccagcttgaactatctttatggctcaaaccaatagaacaatttgccgagacaggcctggaagcaccccctccagagaatcactgatctttcaaaacttggtcaagatctaaagtttattttgcagtacaactccttttttttggagttttactatcttccaacgcaagaaaggcaagtttttcctgctttgatgacgatgaaatgcaggtaactcctttatggagtttgagcttgcttccaacggggaagacaaatgtgagtttcttccttcttctagtaagggaggagaccacccctcatatcgtcttatgcccaatttttgcctccaaagaaagaagtaaaaactaaaaggcagaaatgaaatccacaggcagacagcctggcgccgcaccctgggcttggtagttaaagatcgacccctgacctaatcggttatgttatctatagattacaggcattgtatagaaatgcactgtgaaaatccctatcctgttttgttccaatctaattactggtgcatgcagcccccagtcacataccccctgcttgctcaatcaatcatgaccctctcacacgcacctcttagagttgtgagcccttaaaagggacaagaattgctcacttggggagctcggctcttgagacaggagtcttgccgatgcccccggccaaataaaccccttccttctttaattcggtgtctgaggagttttgtctgcagctcgtcctgctacactaggatggtaaagagcagtcttcagcctgagacccatcccttacctaaggatgggtaactaaactgggggttgtcttggctaaagttaagattaacaaccagctggttgtaatttctctttaccattagagcactcagtagttggataagttgtgccatctttgttttgcttaattgtttttgttgttgttgtttgtttgtttctgtttttgttgttgtttcagtctttttgccattgggattgatcaactctatccgacttgatcaaatccaaaggaaacttccaaattatggggaacaagacctctgaagtggctaaatttccacactgtggtgggggagaaaaacagccaaaaaaggggaaaaaaaaaaacagggaagattttttactttgactacttaaggggctttatttacataacaaggccacctttttgctagccaggccaaactgaaagagcaatggctgtcactccatactgcagttccatagctaagggctctggcttctttttttccaccacgacagcttgggtgtggttcctaaatcaagccatttttggtttgatacttggtacttctgaaatagcagcaatttgttctagctgaattatggtaatgagattttaaaagatttttttaaaggagctcaatgattaaaagtcagcttaactaaaagctaacatccaagatgtgtgtgtgtatgtgtttgtgcatgtgtgtgtgtgtgtgtgtgtatgtgtgtgtgtttgtattgaaaaggccttcacatatttttttttttctcctaggaccttgtctctctttttttttttttagttaaagatttttttttctcagttgactgagttctgttttttgttttgttttgttttgttttatttacttctgctgcctctcctttctcttgcaccctctgctgcttgagggacctaaactattatagtttataatagcctggctttccttcaagaaagcagagaaggcaccagactcctttttggggagaaacctgtttttccttatgaaaccccaagagtgtaagcagataagttcatctcagctcttaaattgcctgcttttgtattgtgttacctgacttattgactaaaagagttgttgcaccaaagcctcctctggtttttaaggaagagtgtagtttacacattggaagtgtcttcgtttaaaaaaaaattttaagtgcactgaaaaagcatcacatggtctagcctcataataattctcccttttgggagattcaggattcagtgtgggctctgcccagagctcagagatctagtcaaaagacaggtatttcctacataaataaaattggtctcttcatataatcctatgacagatttctttttttttttttttctgagacagagttttcgctcttgttgcccaggctggagtgcagtggcgcagtttcggctcactgcaacctccacctcccgggttcaagtgattcttctgccttagtctcctgagtagctgggactacaggcgcccaccaccacacctggctaatttttgtatttttagtagagacggggtttcaccatgttgggcaggatggtcttgatctcctgaccccaagatccacctgcctcggcctcccaaagtgctgggattacaggcatgagccaccgtgcccggctatcctatgatagatatctgtaactttatgtttgatttggcatccctcttttgttttgttttgttttgtttgagacggaggctctctctgtcacccagcctggagtgcagtgacacaatctcggctcactgaaacctctgcctcccaggttcaagcgattctcccacctcagcctcccaagtagctggaattacaggcatatgccaccacacctggctaatttttgtatttttagtagaaacgggttttcaccatgttggccagggtggtctcgaactcctgacctcagatgatctgcccgcctcgacctcctaaagtgctgggattacaggtctgagccactgcccctggtgtagtacatggttttactgcatgtgactagtttacatgcaactagccatgcaagttcagtaacccaaggcggtctataccctgttcaacaagaaccatctactaatgacacttctggaagtctgggcaatgtcaacttgctgtaaaagttcccaaatgctctcaattatcatatgataacaaaggtctcaaatcagtaaattttgagtggccctttactaggaataatcttgaataagctagtactgccctccacaaccacaattaaaaatatatcggtattggttttctcttcagttcaagaatcatgtaaatatgtaatgtagaaaatgaggatttcccatattcccacagaatcacaaagatgatcactggtaatatgcgtgctacatatatgataccaggtttattctactctttttttttttttttttttttttgagacagagtctcactctgtcgctcaggctaaagtccagtgctacgatctcagctcactgcatcctctgcctcctaggttcaagcaactctcccacctcagcctcccaagtggccggaattacaggcacctgccaccatgcccacccagctaatttttttatatttttagtagagacgaggtttcactaagtagaccaagttggtcttgaactcctgacctctggtgatccacccacctcggcctcccaaaatgctgggattacaagcatgagccaccatgcctggccatttttttgtacttttatacaattatatgcttgctttataaaaatgaacttattctacatatatatgttattacattattaggacatgttcccaaatgacatattacattttcatcattcttttttaaaatattttttcgtgagacagtgtcttgctctgttgcccaggctggagtgcagtggcctaatcacaggtcactgcagcctgaaactcctgggttcaagggatcctcctctctcggcctcctgagtagcccagctaagtttaaaaaaaatttttttttggcctggcatggtggctcacgcccataatctcagcactttggaaggccaaggcgggcagatcacttggggtcaggagtttgagaccatcctggccaacatggtgaaacaccgtctctactaaaaatacaaaaattagctgggcgtggtggcaggtgcctgtaatcccagttacttgagaggctgaggcaggagaatcgtttgagcccaggaggcggagggtgcagtgagtcgagatcatgccactgcactctagcctgggtgacagagcaagaccctgtctcaaaaataaataaataaataattaaatatatatatatatatatatgtatatttggagagacaggtctcactatgttgcccaagctggttttgaactcctggactcaagcaatcttcccatctgggttcccaaagtgttgggattacaggtgtgagccaccatgcccagacattttcatcatcctttttttttgagacggagttttgctcttgttgcccaggctggagtgcaatgtcacgatcccggctcactgcaacatccacctcccaggttcaagtgactctcctgcctcagcctcctgagtagctgggattacaggcatgagccatcacgcccagctaattttgtatttttagaggacacagggtttctccactgtttttactagaccttgatcacatcaaaaagattgtgtctcttccatttattgtgcagcttgtacacaattgacacaatgaggagctcagcaaaggacgcagagtgacagcatcctcccttcagtggaatggccatgtctagacacctcttaatcactcccgagaagtagggatgggttcggtgtatgagaataagaaacggagcctccagggttgagacaatttgcccaaaacacacctcttgtgggaagtacagttgcgatcccccaggtctcttgggcttgcaggttcctgctctcccgtgggcccccaggagatgttggctgccaagaggaggaggaatcctcctgggcagaggttaacttttgccactccaggatttgcccaccctggggtccctgccaggaatgttcccccagcaccaccctccccatgccgcctcctaactggctgtgtccttcccaccattcagcaaacacatcctacgtccaggaccagccccttcatctcaggaaggctgccatgggactcccagaacccccatggctcctggagccctgagggaatcacatcttgggtggggagtgatttgttttctcatccagtgcaaccttggaggtaacagtcaagaatgtcctgtgatgcgaagcacttattgtcctgacctctggtccagtgcccttcgctctaagcacatagcatccccaggctgttcctggaggcgtgggctggggtttgtagggactagctggaccagctgggccaggggaggcagccatgcccggggcacatagccactgtccagagctgcccccagagctgggagccatcttgcacatggtgctgtgagatgccctccagagaggaagatggaagctgtctccgtgccccgggactgatgaagggcccattccaggcctttgggcacccgggctcgctacccttctgggagccctgtcctgtgggccaggacaaaggtgccctcactggtggcattctcagaagctcagccgctccccacacatgcacataggggcgtgcccacaccaagccacgtgtgggtgtctggggacaatgagtcttgggggagggggtgggtcccttccagaagggtctggccaaagtccagttatgaaggtgagctgagatgggctccctcaaaggagccatagtgtggggagccccgggcagagcccagagagaaatgccagccccgagaccgagacacgctccaaggagtgctgccaagagcagtagacacagccgctgaggcccacggggcacagtgaggctgtgggagagggtggcccctctgtggccatttccctgcctgtgctcacatcccctcctcaggcctgtctcaccagctcttgcagcccatgacccacattctgtctgactctccttcctctcctggctacagggatccccagtgcccctcaccattccttctggtctctcctctgcctcccggaactgttccccaggaccctctcctgggccagcccttcctgcccctccacatcagtggttccgaaccccggatgcctttgggatcagctgggtacactttaaatccttccagcccagagccctcaggcccaagtcacccccgccagctcctgtgggaccccttggatcagccaaccattttatcatcatccatcatgtcccctgtcaccaagggcctctggcatgttctgttgtccccatgcccaccctggcacccctcacccaccaacctgtgcccacgtcctgccttgagcctgtttcccctcctgagtggtatttcctcactccaggtgggcactggggcagctggcagacatggctgtgagcttctgtcccatccagagggaccctcccttccagattacccagtcaagcttgaccccatggtgtcaccgagacggaccaaaagagggtattgaagccacgcagtcccccgagccccactgagctgcaccagctttggagccggagagagcctgggagactgagcactgagtgctaggtcccttcttcccactcttgagggagaaatcagtgtaaccttcccatcctcccactcttgagggccctggggggacacagggcacaaggagggtggcagaagaggtgtgtgcctaggtgcttggcacctagccggggttcatttctgtcctctcaacttggcctcccaaagtgctgggattacaggcatgagatactgtacctggtcttattttttcttttcttaagatacagggtctcaccatctggcccaggctggactcaaactgctgagctcaagtaattcccccacctcagcctccgaagtagctaggactaaaggcatgaaaccaccatgcttggcttgtccaatttcattctacacactttctcggtatttaaacagctgctgttgctcttcattctgtagctctacatcagattcatgctctagtcctgtatatccaaatgatgactagaggctgccggctctgctctttcaaaggcacaatgagcgtagtccatctacaaaactctcccttttccaatccagctttccctcctgcatcacctatctctctacatctggaaccatcggcagctgccttcataaggcacctcggtctggcattcggaaaaccaccctgtcttgccagagcctcttggtcttgggtagcaaaagctgtatgcaatctaaatcaagctttcaatcatgagaaatcacattccttcttttccctttgtaatatactcatgtgttttttttttcctttctcaataagcaaattgtaccaccatcttattctgagatgctcctttttaaaagctgtagatcacattaatggaagtgtttactgctgggaatattttccacgtgcaatgatctgtaaccctctttttcttttttttttgagaccgagtctcgctctgttgcccaggccggagtgcagtgacacaatctctgctcactgcaagctttgcctcctgagttcatgccattctcctgcctcagcctcccaagtagctgggactacaggtgcccgccaccacgcccagctaattttttttttttgagatggagtctcgcttggtcgcccaggctggagtgcagtggtgcaatctcagctcattgcaagctccgcctcctgggttcacgccattctcctgcctcagcctcctgagtagctgggactacaggtgcccgccaccacacctggctaattttttttttttttttttttttgtatttttagcagagatggggtttcaccatgttagccaggatggtcttgatctcctgacctcgtgatccgcctgcctcggcctcccaaagtgctgggattacaggtgtgagccaccacgcccggccatgcccagctaattttttgtattttttagtagagatggggtttcatgatgttagccaggatggtctcgatctcctgacctggtgatcagtccgcctaggcctcccaaagtgctaggattacaggtgtgagccactgcgcccagcggaactgtaactctcttatctcaactagctgacattattacttcacatcctgttcaatttataaattaagagaggtgccatgggctgggcacggtttgttcactgttgtttgaatgacaaactcatctgcctttttaagaggccagtctttgatgaactttaaactttgtaaaactaatgcattgtgcctgtgtataaaccagtggttctccaaatgtgctgtgtggacctctcgggatcccgaagaccccttccagaaggcctaagaggtcataactgttctttttttttttttttgagaccaagttttactcttgttgcccaggctggagtgcaatggtgtgatctcggctcatggcaaccttcgcctcccaggttcaagtgattctcctaccccagcctcccaagtagcagggattacaggcacctgccaccactcctcgctaagttttgtatttttagtagagatgtggtttcaccatgttggccaggctggtcttgaactcctaacctcaggtgatccgcttgcctcggcctcccaaagtgctgggattacaggcctgagccactgtgcctggccaacactgttctgaatcatactaattaaacctgagaaagctgatgaaaaattttaaaaatttgtgaaagtaatacaaagtcattgcctgctttttcattgacacttgccatgattatataaaagcaaaagtgggtacaatggctggtttctcagcataaatcaaggcagtggtaccaattacattagtagtcattctattcttcactgtcccctacaggtaaaaaacatagcctgaatttcttaagaatgtctttgatgaagcagtaaaaattaatgttgttaaatcttgacatgtctctaatattctgaataagtggaaagttaaccagaagcgctttttttgtttgtttttaaagaatccgtgatttaactgtgaactgaaaaatcacttttttcacagaacatcatttttatttaaaagtacaactgggccagcgcagtggctcacgcctgtaaaatcccagcactttgagaggccaaagcaggcagatggcttgagctccttcaggagttcgagaccagcctaggcaacataacgaaaccctgtcactgtcaaacatataagaaaattagcctggcgtggtgccacacatctgtggtcccagctacaaaggagcctgaggtgagaggattgcttgagctgagatcatgccaatgcactccagccaagtgacagagtgaaactcggtctaaaaaaccagttcaactatcattctcaaaaataaatgaagtgagaggttgtcacttcaagggaaatacgtatttgttcccaatgataaaatttaagctttcctgtggactttgacaaacttgttccttctactgtaggcttggcagcttttcaatacttaaaggtgtgttaaagtaagattggtggttaaactgaaagtgatttttgacacaataaaacataaaccaatatattccaagtaactaatgcatgatattataaatgcaagtagtgagcaaaagatccatttactgtgcaagaaagatcaatgagtactgatggaataaatttattaatatgtaaaatgccaccgtaactaatttaagaaaccaccacttgtgaagttttgatttagtgttaacaaatacccacaactgtctgaaaactttaaaaatacaccttctaccaactacatatttgcatgaggttaggtcatcttattgcttctttttttctttttttgagacagagtctctctctgtcacccaggctggggtgcaatggcgagatctcggctcactgcaacctccacctcccaggctcaagcgattctcctgcctcagcctcccaagtaactgggactacaggcatgcaccaccacgcccagccattttttgtactttcagtagaggcgggttttaccatgttggtcgggctggtctcaaactcctgacctcaagtgatccacccacctcggcctcccaaaatgctgggattacaggtgtgaaccactgcgccccaccagcttattgcttttttgtttgtttgtttagacagagtcttgctctgtcacccaggctgcagtgcaatggcaccatctcagctctctgcaacctccgcctcccaagttcaagcggttctcctgcctcagcctccagaataggtgggactacaggtgcgtgccatcatgcccagccaagtttttgtaattttagtagagacggggcttcgctgtgttagccaggatggtctcgatctcctgaccttgtgatccgcccacctcagcctcccaaagtgctgggattacaggcgtgagccaccgtgcccaacctcttattgctgctttaaagcaaattgcaaagaaagctctagagaatccatttgtctcctattaagctcaacatgagagactttaaataatataaatacatgacgcactttttactcaactttttgttgtagaaaagttatttttcaatgaaaaaattctgttaacaatactgttctcaaggaatattttctgttgttataacctgggtcatgggttactactgatatctagttggtagaggccatgaatactgctaaactctctgcaatgcacaagacagtcctcacaacaaagcattatctagcccataatatcaacagtggtaaggctgtgaaatctaaactaaaaatagattttgaaaaaatttcaattgtataattctaccacactaaatatcaatataatcaatataaacacatactctttgagattctcaatcatttaagaattatgagactcttaaggaacaaagaaaatacaaataatttgcttcaatattttagtaggcacaatacagcttatgatgtctagagctgtgacctaacactgagcttgatatcttgcaaagtaattagctagaataacaagacaggtttctaaaaagctcacctttgtgtgatatgatgaggtatctccaaggtcacactgtggaaggaaaaaaaattcacaacaatagatgttaacatttgttaggcctgaagacattttttaaaaggggggcagaggaaactctcctagtggccctgaaattcaaatcttctagttcagaacagtaccataagggcactttgttttcatttctttgttttttacaaaaatatgagaaccaaaatgcaaggaaatatgccgttagaagacgcgtttctgttggtgattacaatatataaataataacagatttccttgttatatgcttttctacccacgaaacctttcgtcccatgcgatttattttatgtatttatttattttttgacccagagtctgtctctcttgctcagactggattgcagtggtgccatcttgactcctcacaacctccaccacccaggttcaagcgattctcatgcctcagcctcccaagaagctgggactacaagtttgtgccactatgcccagataatttttttttggaggggggcagtgggtggagtttcgctcttgttgcccaggctggagtgcaatggtgtgatctcggctcaccacaacctctgcctcccaggttcaagagattctcctgcctcagcctcccaagtggctgggattacaggcatgtgccaccacacccagctaattttgtagagtgaggctcaaaacaactgagggaaggcaaatctcaattctactaataggtctacacaatattagcactttttaaaaagcctgtaacattagcaggtaagatggatatgtctatggtgcttcaagtagttttcatctctgaaataattttaaaatcacagaatttaaagttacatgctggaaaggaccaatgaccttatgtgacatttaattcaacactcattttacagatcagggaaacagaccttaaaactgacttgcccaaggtcccaccaaataggagcagtttctcatcctaaactcaaattaagcagtggctctcaaactttgctgcacattaaaatcacctgagaagctttaatatctgcctcatcttccacgagacattttaatttaattagtattgggtatggctttgggcatcaaggttcttagtaaacgtttcccaggtgatttcaatcagcagcaaagtttggaatgattgagttggggtgaaaatcagaatcttctgggatgcttttcttcacagaaagatgcctcacatccatcccgattttcctaaaaggcttctcagtgcctagagatagagggaaagtggagatgggaagatacatgtgtttgcagacttgtattttgaaaaaaaccttgcataagtgatctcagcgagttccacctatcccactgacaacagtgcactactgattcatgataaaacatttttcaaaatatcttcttgaagccaatttgccctattaatttgttcaataactttatttcgccaatagtgaatacaccaaatgatcatttctcaaacttgctggtggcaaattaaaacttactatactctcaaaagtagacttctaaaaagtagaataatgaggaaaaaagcacgaaatttgtttcagcaaaattaatcttcaaagctgcttttgaattatatgctaacatatcaaaatctttggaactcagaagaagccagggactctagtcaaagtaatttttgtgtatgtgtgctcagagatttaagagacttagctgactacagacatttagtgattactcaataggtcccaaagctcaggacttgagacagagtttgagtccagtttttgttcgaaacacaatttcctctcaactattgttaaaagggagggaggaaagtgacattattatgagtgtaaactttccacttttaattgaagtaaaagttattgacaattgaattagttaaaaaggctagtgcatttgaaacaaaattgtttataagctagttatgtgtacagaatgaaaagttaaattaaagataaagacattaatattctaaattagcactttccaaactgtgttctaaaaatcaagactaataacccaaggagatgagaataatgtacactggacagcccctgtggagctggtggtggtgttggttgttgttccttttaaaataaacttcatctcagggtgctctcaaagcacatctttgtggcccatgaggtgctcatgcacaatgggagaaattcaaatgcagatacactgtggtgccagaagaagaaaagctgttccttcctccaaggataatgtccaaagtagtgcacactgatttaggcctatgatgcattgaaaaactaagtttccacaaaaaacattcaataaagggaacctatccttctcactgtgttcaacattgtctaaaggcataaaggcatcaaaaagatacactgtttctgggattgcttctttgctaactgatttttccttccaccacgacgtctaagattaaaagagaaactgatacttaatattcagaatctggatatcaatatatggttgactccaatttcttaaactgattgctgaaaaggacaaccaaatgactgaaataattttagaataaaggaatctgtccctcggcagcatagttgtactcatgatattattgtcattgtaagataatgctggatggctgtgctgtcatcaaggaatattgtcgaacacaagctgtattgttgactgaaacgcacagtagatacctgaaggggaagggaagtgtaagtcaaacttatgaaagtgtattattttctcagttaaaatgtcaaatgacaaagcactaagatatgtctcacactccatgaactgcctgagtgtggtatcatgtgcactctatagaaaacccattggaggctctcaacttccagagatgatgtttaagatatgggttataaaatgctgcccttaatatggtacctgtcatcaaacctaacaaggattttatgaattaccgttaaaaataatgggaaaagtctgcttcgaggggcgcggtggctcacacctgtaatcctagcactttgggaggtggaggcgggcagatcacgaggtcaagagatcgagaccatcctggctaacatggtgaaaccccgtctctactaaaaatacaaaaaattagccgggcgtggtagcaggcccctgtagtcccagctacttgagaggctgaaacaggagaatggggtgaacccaggaggcggagcttgcagtgagccgagttcgcgccactgcactccaggccggcagacaaagtgagactccgtctcaaaaaaaaaaaaaaaaagaaaagtttaaaataagatttcattttttttctgcagcaataaaaagcagctgagaatttctattaattaattaatttatttatttatttttgagacggagtctcgctctgtcgcccaggctggagtgcagtggcgcgatctcggctcactgcaagctccgcctcccgggttcacgccattctcctgactcagcctcctgagtagctgggactacaggcgcccaccaccatgcccggctaactttttgtatttttagtagagacggggtttcaccgtgttagccaggatggtctcgatctcctcacctcgcgatctgcctgcctcagcctcccaaagtactgggattacaggcgtgagccacggcgcccagcccttctattatttatttactacgataaaatgtaatgtattaaataatcctgctacaagagcattttattgcagtgaatacaagactaatgcatttactaaattactaatcctaaatgtattatttcaggtgatattgttacaaaagaagtgtttcagattcagaggctctgtgtgccagggctgctaggccaccaacaagtgaggaagccataggtttctctagtcctattttcttatgtggaggataaaaagagtatcacttaaatattctctcacaccctgaaaacaaatgacaacttaaaaaatctaactttcacttcatgtttaaataagactgccaagacatgactcaaatgagactctcggagaatactttgcattcacttcaaaacttgatcaattgcattctataaatcatctgacctgcacctagccattttcctgctctacccctgctctctgcctagaatactgcttttctctttccttgcttcagcaagctcgactccatctaccctcttggatctctttgtcggcagccacaccaaaaaatgtatttttatacactaattagttgaattcaccactgcttacaagatgctaattcctgcagagtattccccttgtgagaaagtatgcctctccataagagtaagggagggcccttactcttcctacctccagctgctgagcatagaattttgagtaaatccaaaacttcgacaagtgtttgacaattcagttatcatttggaaggtaagtcttactacatttaattacagcaaaaacactactaacagtttactctttataggtattatttaaggtagtcacaaaatagaaacaaatactctaacgtcaggcagcataaatgagagtatgaaattttacaatatttaacaagaaatggaaggggttacttagtagttttaaggtttaatgacaaaaactagaaaataatcgtacctagtaatttagtaagtcaaaaccaaagccttaccatcaaaggtgcagtacccattggatgcggatgcccacgcactgacttcttctgctgtacctgctgcctctcattttaacccattaaaaatactaaagttgttttccttgtagacatgtttcacctccttggttaggtctattcccaagtattttagtttagtttagtttagttttgcagctatcagaaaaggggttgagttcttggtttgattctaagcttggtcgcttctggggtataacagagctactgatttgtgtacattaattttgtctcctgaaactttgctgaattcatttatcagttctaggagctttttggaggagtctttagggtttcctaggtatatgatcatatcatcatcaaacagcaacagtttgacttcctctttactgatctgcatgccttttattgttttctcttgtgtgattgctctggctaggccttccagtagtatgttgaatacaagtggtgagagtgggcatccttgtcttgttccagttctcggggggaatgctttcaacttttccccctttcagtatcatgttggttgtgggtttgtcatagatggcttttattatattgagctgtgacccttgtatgctgattttgctgagggttttaatcataaaaggatgctgcattttgtcaaatgctttttctgcatctgtttagatgatcatgtgattttttgtttttaattctgtttatgtggtgtatcacatttattgacttgtgtatgttaatccatccctgcatccctggtatgaaacccatttgatcatggtggattatcttttttttttttttgagatggagtctcgctctgttgcccaggctggaatatgcagtgcggtgatcttggctcactgcaacctctgcctccgaggttcaagcgattctcctgcctcagccacctgagtagatgggattacaggtgagtgccaccacacccggctaacttttgtatttttagtagagatgggacttcaccatgttggccaggctggtctcgaactcctgacctcatgatctgtccgcctcagcctcccaaagtgctgggattacaggtgtgagccaccgtgcctggccggattattttttgatatgccgttgggaactacaaaacgttgctgaatgaagtcatggacacaaacaaatggaaagacaccccatgctcatgaatgggtagaatgaatattgtgaaaatgaccatactgccaaaagcaatctacaaattcaatgcaactcccatcaaaataccaccatccttcttcacagaactagaaaaaacaatcctgaaatttatatggaccaaacaagaactggcacagccaaaacaaaactaagcaaaaacaacaaatctggaggcatgacattacctgatttcaaactatactataaggccatagtcgccaaaatagcatggtactgatataaaaataggcacatacaccaatggaacagaatagagaacccagaaataaactcaaatacctatagccaactgattttcaacaaagccacctaaaacataaagtgaagaaggtaaaccctattcaacaaatggtgctgggataattggcaagccacatgcgggagaatgaaactggatcctcaactctcagcttacacaaaaatcaactcaagatggatcaaggacataaatctatgacctgaaaccataaaagttctagaagataacattggaaaaacccatctagacgctggcttaggcaaagacttcatgaccaagaacacaaaagcaaatgcaacagaaacaaataggtgagacttaactaaagagcttctgcacaggaaaaggaacaatcagcagagtatacagacaaccacagagtgggaggaaatcttcacagtctatacatctgacaaagggctattatccagaatctatgaggaactcaaacaaattacaattacaaaaatatggaaccagcccaaatgcccatcaatcaatgagtggataaagaaaccgtgatatacatacatatatatatatatgaggaataccacctcagccataataaggaataaattcatggcattcccagcaacctggatggaagtaagactattattctaagtgaaataactcagcatggaaaaccaaatatcatgttctctttcatacgtgggagctgagctatgaggatgcaaagccataagaatgatacaatggactttggggacttgggggaaaggctgggaggagggtgagggataaaagactacaaattgggttcagcggatactgctcaggtgatgggtgcacctaaatctcacaaatcatcactaaagaacttagtcatgtcaccaaatgccacctgttcccccagaaacctaaggaaataataaataaataaataaagtacagcatttttctcagcaaacataaaataaaacaaagactaaagttcatatttttcactctccttttgggcaggacaaattttagataggtttttaaagaattagtaacttttttcctttttccgagacagggtctccctttgttgcccaggctggagtgcagtggtgcaattatagttaactgcagcctcaaactcctgagctcaagcgatcctctgcctcagcctcctgagtaggtaatacgaaaggcgcatgccaccaggcctggctaattttttatttaacctttttgtagacatgaggtcttgctatgttgaccaggctaaaaatgaacaaatcttaattaacttaaatatttctaacactttgggcattcaggaaaacagctccatctatgttgtgaagtaatgggaagtatatggcagtggataaactttgaatgaaaatattaaacaaggccttaggagaaaagtgtaatatgcttattatagatacattaatttaaaaaattctctggcttaatataattaattatactcaaattagattttgatttaaacacaggtcctaaatttggattaaatataatagattgaccacaaatttatttcgtctccctccggaagcctcattagtcataaaataaaggttacacccatgaccagcacagaaggttgacagagataatttttaataaatgctgagacataaaaagtagataaaggagtggtaaataacacagaaacacaactttggtgcctacagaaagtgactggaacagaagcgagccagtttatcttgcagaactaaaggcaggttgtgaacttacaggcaaatggaactttggaaagtagggtaaaatgtgaaaaaaaaaaaaaagccagcaaggtcagttgcaaatctctaactagagccccaagtccacctgtccttccatctgacaagaaacttagatgtgtgttctctggatatatcaaacctgagaatttctggctcagagataccatggcttaaacctgagatataaagaaaactgtacaccaaaaatggaactccaactttcttcgctaactctgtttttcctttccaggcctgcttttactttccaggcagaaaattgggagatccttctcagaagaaactgaaatgtcttcaataaagatccccagataatacactgaggtctcccaaatgaaaagctagtcaggcttctaaggcctcacactgagtgctatcagttaacagaaatcctgcttccaaataaagcaggccagggaccaccacacattggagggaagcctccaagaaaagagatcaaaacaatagaaaaaaggaattgataggaccagtcaaaatcaggagcaaaactttaaaaaaaaatcttaaaacactctcaaaaaatataaaattcaatagaaatggtagaggataaagtcacagaatatcccagaactagaataaaaagacaaactgaaaaaaatacaaggggaaaaattaaaaatcaatgcaggcatattggtctaagcagcctagcatctgaataacaagactatcagtaaaaaagtaacagagaaaataaaaaaaaattctcaagaagagatagtctgcaggtttagtagcctcaataaaatgaaaagatccccaacaagctgttataaaatttcagaaccttagagagagagattctaaaaagcttccacagataactaaaacctggttgtaaataacgtatcacacactggcaatagattcaagaacaacactgtaataagagcacaactgcaaaatgtcttcagaaccacaacatttagattcaacctagaggtgtactctctatcaaagaggagggattttaacatctccacacaggaaaatgtgttcaagtacaactagagacgataacaggacagaaggaaacacagaatctaggactcaggtgatcccacacaagacagcagttacgtgagataccaaaagactttaaagagttagcccagaaaagcagacattgagcatatctagggaaacccacgctatattgaactaggatgacaaaaggccaaagaaagttgccccccacacaaacataaaaaggaacagatgtgttttcgcagatggaaaatatctttgaaaggcatgtgataaatgctacaatacttgggggaaaacagctgttagaaaacaggcaaatgaatatagtcagaaaattagcttcatgctaaaaaataatggatgtgaaagcaaacagagcacccagaggctacttaacgatatttggatagataaactaatgtaggctaggaaaaaagaagatccaggagaattgcagaagtgctcagatttcagaactgtttcagagacaggatgaaggacatggaatgcagaggcacagtgaaaacaccatatgacttagcagtgaataatatttgcagagtcataatcatgtaaatattactgatttaattaaaaagtgtgctacaattggaagaaacacagggagaaacataagatcatggtgtagcggggaaggtatgcttttacctgctgtgacagaaagtcaatagacagtgctggcaattaacttagctattctatttttgttctttcattaaaaataagattaaatatttaaggcaattttttttttttttttgagacagagtttcgctctgtcgcccaggctggagtgcaatggcgcgatcttggctcactgcaacctccgcctcctgggttcaagtgattctcctgcctcagcctcctgagtagctgagattacaggcatgcaccaccacgcccagctacttttgtatttttagtagatacagaatttcaccatgttggtcagggttgtctcaaactcctgacctcagatgatcagcctgcctcggcctcctaaagtgttgtgattacagacgttaaccaccatgcccagccttaaggcaggtcttttgaaccggactattgaaatttaacttaaatgtcagaaatctttaaaaggtggacacgctaaactaagcacttttctggataaatttaatactcaggaaaatagaagagatttagaaaatccacaaaaagaggtccatgctaccaccaccaggtccacattgtaatttaaagaaatcaagagagacatccttttatgtcaaactatcaatttcttaactatttgagtgtttacttacatggtttgtacagttgcttcttcttatttctacaactaagaataaaaaaaaaaaaactggtcacttctgatacaaataccataaaataaaagtagttgttaacatcttactgattactcctatgaaaaatgagacaaaattccattaaaaaaaaattttcaataacatataatttaaattatctggcatgattaatttcataagtcaaatctaaaaacttagattttcatttagtttactttttgtttctattacatacaaatgaaagaatcctcatgtacaaaagaaaagggcaaaaaaattaggccagatgaaaaatttagctaataaaaagtttaactgttgcatatatgagccatgatccattagtattctctcattctgcatttacacatagcttactttaattatcagactctaagagctaacagttctaaaaactacttcctgaccagacacctatctctagatgcaacagaatccctgtaagcatcttgaaccacacttagtggttatctactaatatgtcactaaaaacaaaacaaaattaaaaaatggtctttacacaactggaaagtaacctatcttaaatttgttttcttttttgagatggagtctcactctgtcacctaggctcgagtgcagtggcgggatctcagcgcactgcaacctctgcctcccaggttcaagaaattcttcagccttagcctctggactagctgggaccacaggcacgtgccaccatgcctagctaattgttttttgtatttttagtagagacagagttacactgtgttagccaggatggtcttgatctcctaacctcgtgatccacccacctcaacctcccaaagagttgggattacaggtgtaagccacagagcctggcctaaattttgatgttaaaataagtatacaaacctaattggacatggtgtctgcagcacaaaaaaatcatttttttttccctaaaaagaggccagaataataaaagccccaagagggacttgggccatgctttgtttcctacactgcctctgcctttgatgctgggagggccttgtaggcaaaagttactaccactgaagagtgagggacatggaatagcttttcttttactgcttccatgctctctaggtgtgagaagcccatggctctggaaggaactgggaaatacaattctgatatgttttggatatgttgcccctccaagtctcatgttaacatgtgacccttaatgttggagatagggcctagtgggaggcgtttgggtaatggcagtgattccttatgaatggcttggtcccatccccatggtaataagcaaattctcattacggtaatttaaaagactgtggtactggccaggtgcggtggctgaagcctgtaatcccagcactttgggaggctgaagcgggtagatcacttgaggtcaggagtttcagaccagcctggccaacatggtgaaaccctgtctctgccaaaaatacagaaattagccaggtgttatggtgcccacctatagtcccaactactcgggaggctgaggcaggagaattgcttgaacctgggagatggaggttgtagtgagccaagatcgtgccattgcactccagcctgggcaacagagtgaaactccatttcaaaaaaaaaaaaaaaaaaagagtgtggtaccttcccccttcccctctctctttcaccgtgtggaaccacctgcttcccctttgccttttatcatgattgtaagtttgctgaggccctcaccagaagcagatgttaaagccatgttggtacagcctgaaaatctttgagccaattaaacctctttttgttataaatcacccagccttaggtatctctttatagtaatgtaaaaaatgaagacaaattctaaccagaaataactgactcaagatgggcaaagtctactcaaactataaaaacaaaggttacaaactcccgtgttttactgtgctgcattacttcgcacactattatagaaccctcacttgtattcttgctgtttaagtcaactggaaaacttggctgtgtatggcttgttggcaaataaatgaggatttaacataacattaagggaaataagcaggagtagggcacgtttaaatttacattacatcgaatgaaaaagttaataacctaaaacttttgagtagcatgaacttggatgtggtaaatgaatgtggtcagaggactgtgtaagaggaggcccaaatcacagattcaatccctgatgataaacaactatgttttttaagttgtttaaatgaaaaccaagctgaagcctaagttctatcattcatctttaaagtgtactttttggagcaagggaaaagggattataaataaagataaatccattaattataaataaagataaatccaagaattataaagagaaatccatgactcctccatcacatcacaaattaattgtgttgataaaaagatggcaaaatgtataaacaaaaaggttacacattttcactaacatcataacaactaaaggaaagtatatcacatattaaaataagacaagtgaacatgtgaaaaggtgaaaaatttaaaccaatatgagtttttctaaatactttctataacctgatcaaacaagagattttattctttctcttggcggaaaaaacaatgtcgtctcaccatctgtttgagagttcctctggaatattgtgtttgcctctggattggcagaagggttaaactccaaagctatatgcatagaggaagaaaagaaaaaaagatgtaatcattgataaaaatttatcaactcatttattcgactgctgcatttaggctatttcactatctctactttgattcttatccattgaaatgaatgtatagacataagatagagccaggcaagatggcacatgcttgtagtcccagctactcaggaggctgagatgggaaaatcacttgaacccaggtcaggaagttgaggccagcatgagtaacacaatgacaccctcctttatttaaaaaaaaaaaaaaaaaaaaagaggtaaattttggctttgagttgtgtaaaatcaactttgcataaaataaatcaagatagcagtaagttttaaaagacagtctattttataggcaaaatataagatgtattctagagtttttaaaatgtttaaaaagtaaattcatcatatctgtcacttccatttcattctgaggacacagaaccttagttctcttgagtagctgtcttccatagtcatgtgatatctctaagttttcatttcttcattagcaatacatagggagaacatacacaggccttatttgtattggaaagggccaagtgagacatacataaactgtgttgtaatcctaaagaatgacaataaagagtcatttttgggctctcatccaacactacccatctactaactggtgtgtaacatccatcaggctttccgaacatcaccaagcagagtataagtttacacaagtacttacatgctttgtgtataaaggtacaatcaattaattcacataatgcatttgtttattctaaagcaatccttaaatatcttgaaatgtgaagatagtacttccaagttacaaagtcacactcataatgagtcttaattatcctacctctttaaaaattaagagcccgaccaaagtttaaatagaagagctataagacatttcctctacagtgatgaaatctctggcatttaaatgaaaccaataagccaactggatttaatatgtttatgatgcaatgttttctattttgaaaatttcagtttttattcaagaaccatattattacccagaattacttttacttagattcatctctttgcaaaattttagaggcaaaccaactaattgttttctcttttctaccggctcccatcccctgcctctgccagcagtgtagagactaaaaaactccaactttctttcctttttttttttgtgagacggagtctcgctctgtcacccaggctggagtgcattggcgtgatctctgctcactgcaacctccacctcctaggtccaagcaattctcctgcctcagccttgtgagtagctggaactacagtcatgcgccactacgcccagctaatttttgtattttcttttttagtagagacagtgtttcactatgttggccaggctggtctcgaactcctgacctcaggtgatccgcctgccacggcctcccaaagtgctgggattacaggcgtgagccaccaagcccagccaaaactgtaactttcttatctttgaacaagatgctattgtcaggaggggaagggacaaagggggagccatggcaacaaacactctaacagggaaggtctgccattttaacctgcaatctttatattacacattaaaagtctacattgacgtttcatgtcttttgaaagttttgaccatgaaccaatccccacctctcttttagaacaaggaggtaaataaagtctgttaagtcaccagaataaatctggagacacattttctgttaaagtaagaattttaaagtaatcagagcctcataggtaaactcctttgagaaaccccaaacacacacacacaaccatttttctgcagccccggctgtgacatttcacacctttcacaattattttaagcattctccttttttctttttccttctgtgttcaaattacagttagaagaaactaagcagcttctatcaaggtgacttaaagcagcccattaagaataccatatagcctctcccgtggcaacctccattctgattttaaataagaaatccccaaatatttgaataggaactgtcctgagatttggctactttaacaaaggaaacaattaggcacttacctggttccttcacttaggtaccatctggataggtacaaagaaaaaataagatgggtactgaaaagttgggatatttgagtttttattgagaaaaggaagagaatagctcaaagaagcctaaacaaagtcccacaggataataaacagagctacagacactgttgtctcaccatctgtttgagagttcctctggaatattgtgcttgcctctggattggcagaaaggttaaactccaaagctatatgtatagagggagaaaagaaaaaagatgtaatcatttataaaaatgtatcaactcatttattcaactgctgcttattcgacaagagccataaataaatggccccatgccagcctgggagaatgagatgagagagcaagaactgggcgattgggaggggaggcgaaaagaaactgactggactcggtggggaaagactaaggggtgggaattcaaggcagagccagcttttgttcctggccagcccccgggaaagctggctacaagcagaaaggagctcgaagtgggggatgcctcaaagggaaccttggggacagcagcagccaaaggcaaaccgagggtagatggcacctatcacctccttaccttcaggcatctcccggtcacgaacgtggtgcatgtggaggtcctcaccaacttcaacagtcacctcagcaggctgtacagcagcagccatgggcgctcctgccatcctgtcctcagctcctgcctcatagatctcagattcagagggacacaccgacccctgctgctggtcaaactcgaggctgacgctagggtgcacacgacaggtcagtatgttccccatggggcgcctctactgtctgccaccacctgtgcctctgctcacagctttggccacgcactcccgctgtcctaggccgaggctatgctgcacttgcagagatggtcttcccgctcctcgcctgcccacctcacagcgcggccccgggcaccagccctggccccggccccggccccggccccggctagggctgcgggccaaggcccgcaccctgctgcctcccctgagttgacttgtctgggagggtgaagaccagccggcttatttaataggttgtgaacccaacaagcgctgagagacacaacaactgcctgaaaagagaacagacggagctccttctccttctgtagtcacctacagactgaagcccactggccccaggtgggagcccaggcatgtggcacacaatgccccaccccacacttcacaatgccctccccgacacctcacagtgccccaccctgcctgccacccctccccaacagctcagaatgcccctgccttggctgccccaccctgtggcttatgatgctgctgctctcctggcccctcgtgcagtgccagtgggactaaggttttcattcatcaccagcttcctgagattttagtcctaagaaaagcacagggtagttcattccttgaagccagcttcctctatgagttctatacaaagcctcagtagagtgggtcccattagcaaccaagttgaacaacttttatttgctgtctgaatatagatacacctgaattgttgactgcttttgtaactaaacactcctctcctgtcttccaacgagtggtcatttttgtccgcaacttgaccacagcaatccctggggccctagctctactctcaataaagagttatggctgtgtgttttgaatgacaccttaggacccatcctgcctccacctccttctccataaaatagaaacctaactggcacctccaagctctgaaatgctgaaacttaccaactcccttttctccccgctatttcttccttccatggcagggactttcaggttttctttcttttactaacaaggcactaagcatgattttctcatacaaaatcgagagccataaagtggcttaccacagtcctatttcaataaagatgaatactcgacatctggcaagtagtgtgtgcctgacagtgtccccactgtgctatgctcatttaaccctcagaaacaatctcatgttacagattttacagaagttgttgagatggagaaggtaagtaacctccccaaggtcacatgactgctaagggtggggccatggtttgatcccaggtagtctgaattccccaattgcttaagcatgagtatcagaaagtatagcagtctgttttcacactgatataaagaaacacctgaggttgggtaatttttaaaggaaagaggtttaattgactcagtttcacatggctggggaggcctcaggaaacttaacaatcatggcagagggggaagtccttcaggaaacttacaatcatggcagaagggcaggtccgacttacatggtggccgcacagagagtgggaacatgtgaaggagcaactgtcaaacatgtataaaaccatcagatctcagctgggcacggtggctcacacttgtaaccctagtactttgggaggccaaggcaggtggatcaactgaggtcaggagtttgagaccagcctagctaatgtagtgaaatcctgtctctactaaaaatacaaaaattagctgggtgtggtggtgcatgcctgtaatcccagctactcaggaggctgaggcaggagaatcaatggaactcaagaggcagagactgcagtgagccaagatcatgccatggcactcctgcctggacaacagagcaagactccatcccaaaaaacaaaacaaaaccctataagatctcatgaggacttactgaatatcacaagaacagcatgaggataactgcccccatgatccaatcacctccccctaggcccctccctcgacacatcaggattatggggattataattcatgatgagatttgggtggggacatggcaaaaccatatcagaaagtaaaggtagaagtcaagcttggatgggaaatgacattgtagattattattattattattattattattattattattattattttgagacgaagttttgctcttgttgcccagtgaaattgtttctctaatttcattttcagattgtgtcttgtagatgtatagaaatacaattgataaatgattctggctattaaccttttatgcttcaaccttgctgaacactatttttttttttttttttttttttttttgagacggagtttcgttcttgttgcccaggctggagtgcaatggcgtgatcttggctcactgcaacctccgcctcccgggctcaagcggttctcctacctcagcctcccaagtagctgggattgcaggcatgcgtcaccatgcccggctaattttgtatttttagtagagacggggtttctccatgttggtcaggcccacctcagcctcccaaagtgctaggactacaggcatgagccatcgtgcccagccagattcgtatatttttaaaagaattttttttactttttattttttttttgagacagagtctcactctgttgcccaggcagtggcacaatcattgctcactgcaacctccacctcctgggtccaagtgattctcattcaagtgcctaagcctcccaagtagctgggattacaggatcccgcccccatgctcagctaatgtttgtatttttagtagagatggggtttcaccatgttgctcaggttgatctcgaactcctgacctcaggtgatccacctgccttggcctcccaaagtgctgggattgcaggcgtgagccaccactcccgaacagaacaacatttttttgatgtggattttaaaatgcctccccttctttcaacattgattaagtcccttctacatgccaggcactgtatgtgtgaaatagtcccaactctcaatgagtgtaggcagatacacaaacaaaggcttaaggaggtcagttttctgagaccatactgctggacagtatatgaacctgggatacaaacccacctctatttgacctcaaatttgatgctggggtggttttaattttattctgggaatttcagtcattcaaccataaaaaggtgaaaagtctctgtcagatgtgcgtgtagtggtctgtataataaagactgaaggaagcaaccaaaccaattaagagactttctctaaaggcagagtaatgctaagggcagtggcagtgacaaaagtggaggaaaaagtctgtgatcatttgggagacagaataggaagtgcttggtcatgagatgtgaaagaagaggggaagtagaaggaaaacagagctgctcaggctctgctggggaagactgggtgtgtagcagtgccttcctcctggccgagaatgtaggaagagaaataggtaaggaggaaaagatagttttttactctcagtgtcacattaaaatggaactctctggtcaaaagttgaatataaatctctgtaggctaagtccatttgtgacatcccaacatatgttttcaaaaataacatacacactaaatcaagccattaagcgtaactggggaaatttcctaaaatttacatgctaaaaaatcaccatttttcatttattactttcatggagcaactttgaatctatggttacagcaggtgaggcaccttgtataaaataaagctaatacatgaaataaaaccatttaaaattctattgttctcagagaatggagaaagcaattgaagccatgggtgtggaggtgactgccttgagaagttgtgtatagtaaggagaactgggaagaaagaagacctggagaatagggtgatttgcacggcattaagtgaagcttgaaaaagtgagcactgagactcaagagacatgtatgaatcagaaatggctgctcctgtgagttgttagaaaggagatgatgccttcttttcatatctataacagtagcacctagcacagtgcctgttcaataggtactcgacatgtattatcccaatgcagagtcaaattttgccaggaaggcaggaaagctacaaattagctatggcaacttagtgattgggcttgggtgtgtgtgtgagcgagctggatgtcaggcagtgggcaaagtagtgaactggaggtgagaaaacaatgacacaaactcagggcttctcttcccaagtatttggctgagaagagagatgtagtattaaagggagatatgtggtaaaggaagccttttatttcaagattcaacaaaagcgtgagtatacttctatgttaaagggaaagagccaatagagaaaacacatttttgaggttagaagagaaggaagaactaatgcagaagggccccaaaaggcacaggtgcgtgcaatccggatcagggacagattagctttggattcctacaaaagcaagaagggagaaaggaccatgtgacactagagatatttctggtaaaggaaaggtttaggaaaatatcttttgatgacctttattttaacataatttttttttttttttttttgagatggagtcttgctctgtcacccaggctggagtgcagtggcacgatctcggctcactgcaacctctgcctcctgggttcataccattctcctgcctcagcctcctgattagctgggactacaggcacccgttaccatgtccagctaattttttgtatttttagtaaagacggggtttcaacgtgttagccaggatggtctccatctcttgacttcgtgatccgccggcctcggcctcccaaagtctgggattacaggcgtgagccactgcacccggctagactttaaaaaaaaaaaaaaatactgtgggaaaaaggatattatgtatagaaaagtctacacttcttgatacaactaactaaaaaaagcctgatacactaaacaaaacccaaataatgtcttccctaaaagtgggtaacttgaaaagcaattcgagcaaaaatcaaggagttcaattataaataagtatatcaacaaagtgaaagatgggtttaatttttcccacaaaaagttaaaagaaataacagcagttttagaggaagaggaaaaaataataagaaaattatatgcagttgcaaaatgtgtgactatttacaaactctaacatataactacaaaacggaccagaagaatcattatcataggaagcaaagggtcatttcaaaaatcagaggagggatgattcatatttaatttaattctgtggaaaacatttaagtaacctttgaggacaaaaataggtgatatgttgaaatgcgggaaaccacagtggaaggaaaaagaattcaagaaagctcagtttcagtaaccagtatctagtaaaatcttcaggacctagaggctacaatctgcattaatagtgtctgaagacctagaaatgtcattaaataccattttggataattcttgtagacttgagatgatgtctatttaaagttacaagacagtgcctgtatttctgtattcataacagaaaacaattggatatggaaaagaaactaacatgctatgccacaatctctaaagaaagattagggaagtttcagcttaaagcaagaataatcacaataaagttttacaaccctttgcaagcatatatgaaaaacttacaaaaagtttgtaatgatcttttcttaagctaagagaatggaaaaaatgagaaaaattaaattataaaatgaaactttggtttagaggtaagaaacatttgatgacagtcaagagatcagggttgtacagtgtattatgtgaatgttgtgactcattggtttcatcttggatatcataacttgacattttgtaaaagtgatttttcatgggagttttttcaggtgccctataaagtcctgtcccatgagaagcgaataatagtcttccatattcttgagatatcttaatgaatagcatcttctacagtcttccattgtttagtccttggagagacactcattagtgactgttaaggtacctgagttattaggtgcctgtagactatgcccagtgatatgtgcattaggtacatgctccctagctgcgttgacactgactgaagctgtgaggtttcacaatgacatgtcagccaaatacatatgctcagatttaccatttatcaagaggtcttcacactatcaattgtgcaattatcattctacacacaggcagcgataaagggagtaaaaaaacacagccatggatcgggagactaaggtacctccagaggagtccagtgggtccagaagccctttggatgttggtcagaggctcctcttgggcagagatcacagcagcagccaacaggtctggtgaaatccttaagagttctcatggacaaagtttgtgaaggcatcttagacaagatcttgtctttgctggttttatgatcctctgcagatgggtctattctcattatctcagccacctttcacttcctatcagttcagttcaggtctctcatgatcccaggcagcagtagttgttatcacgtgagttcattcatatatgtttatctctttggggatggggggacaacttcactgtggacttaattctactggagatgagtgaccccattttaagacaacatgatcacaaattattatcacatatcagcagggcagacaatagctatgacctggggctgaaagcaggtaactccatttattctgcaaacattgtcttgattatggtgccagttgctgtgagggatttcctttccaccacctgtttttcacaaggtttgagtctgaactgctaacattctactgatttctgggtgaagggactgactgcaccatcctagcctgtcagagcattcgccccaatacttccactttaagagttttccaccttgtccagaactacagtccattaatcccctcattttctctcttaagagaataaacaggccaggcgcggtggctcacgcctgtaatcccagcactttgggaggctgaggcgggtggatcatctgaggtcaggagttcgagaccagcttcacttacatagtgaaacctcgtctccactaaaaaaaataatcacaaaaattagccgggcatggtggcaggcacctgtaatcccagctactcgggaggctgaggcaggagaatcccttgaactcgggaggcagaggttgcagtgagccaagactgtgccacagcactccagcctgggcgacagagtgagactccctctcaaaaaaaaaaaaaagagagagagcgagaataaacaacccatgtcaagtacacacccacatccctcttatcccaaataccaaacacacaaaaatccaatctgtctccttctacctaagcaattttagatagtcactttctcataattaccttaagctccctgacttgctgctcgtcctttctctggcaaaatctcatccttggatgagcccgactttgtgtttgctcaatgacaccactcacctgaaccagaaaaaatatcaaaaagtggtcagagatatcatcataaattcaaattacttacacaaaaaaattggccctaaatgtttccagaaatcaataaaagttttgtttctccaatgacatcatttcttcagaaacccaacgtgtataacctattttttctatgttcttctaacatttattcaacttctctcatctgatatcttgccaaatcattcaaagagaaaatatatcccattaggcaagagccgaccatattcccatcacctgagaaaatcatatgcacaggatgcacccacctcacctttctctgcctcatcatgtcagaaaaagtacccctccttttgccacaaggcaaatctgagataaaagatttagatggcctgtaattccagcacttggggagaccaatgcaggcagattatttgagtctaagagttcaaaagaagcctaagcaacttagggaaactgcatctctcaaacaaatacaaaccattagcctagcatggtggtgtggtggcacatgcctgtagtcccagctactcagggtggggagcactgaggtgggaggatcacctgagctggaaggttgtggctgcagtgagccgtgatcacgtcactgcactccagccagggtaacagatattttttaaaggatcttctctgttaaaaataatccaataaacaggtggccatgaggctgaggtggctgccgtgcactcaattcctccttaaataaaccaaaacttgactcagtgtaaataataaaaggaaacttaagcttaaccaatcagaaaccaccaactaacatctaactagagaccttccactgtaatgttccaaatgaggccactgctccacttcacccaatcaagtattttctttttcttccacattcaccatataaaattcttcccccaccctccctaagcctctctgtgggacctctgagctgcttgcagtctggggctgcctagtttatacatttctgaatgctcaaatatattttctaatgtttcaaagtggctctggtgtaggaggttgttggtggagtgacccgagagtatacaggaattgagggcatatgagatctctggactctgcactccattttgctgtacactcaaaactactctaaaataataatatatctttaaaaatctataactagcacgtagcccttttcaagcctccaactggttggagccagttcgattaaagctcagaagaaaaactggttaataagctagttctgacccaactggcaagaagcagcaggaaagacccaggccaggggagcatattgcacatgcatgcaccaggaaactggaggaagcttggaggccctttagcctggtcctgagcccgctgaaactgcagttacaggcacagatgcctggggcaccaatctgaatctgccaacatccaaggccacatgaacacaaatgcgcagtctcctctgcgatcggtagctaaggatgttaggccatgattggactaggatgggagatgaactgagaactctggattctgtaggttgttgttgtctcttcccacccccaagcaacaagtgatgaacacacacacacacacacacacacacacatcctgtagtgactaacaggatctccctccaggggatttgcagaaaggggagcagaaaacatcccaggggcctttcacagctacttccttgagccccctttcagactgctgtctagacctgtcgcagcccaaacatcatcaccctgatatgcagaagctggcatccttacctgaaattcaacaccaagaaatgatctcttctactcaacactgatagaaatacctctaagcaacgtcctcattggcaggggtggagtgggggagtttcttaaaaagggaggcctctgcctaccacctagagaacctggaaatttccatctgtgccacaaagtccaaatcactagccactgccccagtgtatggcagattagaacatctctccattagatctgggtttctattccattgagtgaaatggcttttctattacaggaacagaataagggttcaaaagggtcttacaactgaactccagtgtacagtctgcacagacactaggcttgtgcaaatatgacacagcgaggccccaggacccttaagccagctgaatgtactgagtttcaggaaacagtgagatacattcagcaaaacagtgggcttcatgctgaaagaagtcactccaagtaaacacacatcacacacacacacacacacacacacacacacacatacacacacccgcagacaccctagtggccaataggtcctctcaccaaaaacctgtgatcaggagagcagaaagcctcccaggggtccatcactgccctttctggagccccttatcagatggccagccccaggacagcactgtctgatcctggtccagtccaaaccgccatcaccctgtgatgtgggagctggccacttcaccagaacctctgtgtcagaaaaatttctcttccttttaaaatgatgagggggaaccttcagacagtgtctgattagggtgggtggagagaggggcttcctagaaagtcaggcagggcagggctgaagccctctgggttaactgtgtgcttttgatatgaagtcaggtaagactggacaggtgggcgtgttagtgaggggatggtgtagggtgtgctgaagaactccacttgagctctgcacaccagggaaaatgaccataaaacatcccatcttcactgctcagagaaggctagatctgctgtgagctagaaagccatgtgggggcagctgatgagtcatcaaatgggagaaatctgagagccatgtgttccacaggcctctggtccttgttcaggcagcagggcactgtgacatgtggctccttggccccttccagccaccaccttgattgcatgctgcagggaaagagactgaagaccaagaatggggtcttgctcaccatgggatgatggctcagtacagagctgagctatgtatggcccaagaggcagaatgtggggatgacccaggctgagctgggggatccaactgaacatgcacttgctaagaagctgtgggctatgatgccttgggaccccagtctgggtctagaattgtagcaaaacaggctactggtaaaagttcttgggaagccaactcacttttgctgtcatccatgggcaaacaaaccaagccccaccacttcccactccctctgaaagcctcctgcccctctgatcgaccacaccacaatggtgtcactctgtaaggcacaggtagacaaggcatccagccatgaacactccagggcgcacacatgtccagaatacactggttcttgttgagactccactcttccaactcagacagaagctccccaatctcctcagccactcccaacaactggaggtctgaaaactttcatgcatgccgctatggtctaaaccactcgtggcggttttcattttcattttcctgataatcagtgatgctgagcacctttccataatgccttttcaccaactggatgccttctatggctaaatgtctattcaaatccattgcccatttacaaatctgcttttttgtgggcttctttttttctctttttttttcctatttatttatacaagttccttaggtattttggatattttttaaaatgattttcaattccactgcccagttataattttttttttttttttttttttgagacggagttttgctgttattgcccaggctagagtgcaatggtgcgatcttggctcacagcaacctccacctcccagagtcaggcaattctcctgcctcagcctcctgagtagctgggattacaggcatgtgccaccatgcccggctaatttttgtatttttagtagagatgggttttttccatgttggtcaggctggtctcaaactcccagtctcaggtgatccatccacctcggcctcccaaagtgctgggattacaggcgtgagccactgtgcctggccaattatcccttttagtgtttttttggggggttgggggaagaacagagactcactctgtcacctaggctggagtgcactggtatgatctcggctcactgcagcctccgcctcccaggttccagcgattctccggactcagtctcccgggtagctaagatcatgggcacgcaacacatgcccagctaatttttgtatttttagtagagacagggtttcaccatgttggccaggctgttctcaaactcctgacctcaggtgatccgcccacctcggtctcccaaagtgttgggattacaggcgggagccaccactcccggccccattttgtgttttaacatcagtcgacactcgtattttaaaataacaacaatgaatggcggtaccttagaacaaaggaattatagatctttctcttgtcctagtgcagacattttgtctataaaatgttattcacagatgaattcatgagaacattactgtgaattttacatccatatacaagtgtatgctcattcatgaatatttcaataaaataaaactaatagcaaaaaagaattccagagttgaagcagtttcaggaaaaaggagttggcagtatgaagtaaaatagcaaaaaaaatgtttttttaaatgggtatatttgtgtctacaacttttttttaattatagcattagacaatgtgtatatatatacgtatataaagcaatggaagtagcattgttttcatactagtctagaatattaaaatatatgtaatatgtgatcagcaaaataatggccccccaaagatgtccacagattcctagaaccttacatgaaaacggtacatcatgcatgtgattcaggtaaagaccttgacatgaggagactaccctggtgctatggaatgaatgttgtgttccgtcaatgttcatgtgttaaaatcctaaccctcaaggtgatggtattaggaggttaagccttacgggagactctgccctcatgactgggattagtaccttattaaaggcacaagggagcttgtttgttcctctcaccatgcgaagacacagcaaggaggaagcctctatgagaaagcaggccttcaccagacaccaagactgccagcaccttgatcttgcacttctcagcctccaggactgtgagaaacaaagttctgttatttataagctacctggtctaatgcatttccttgtagcagcctgtacggattcggacagtgggctcatgtggatgatgacggtgtctccattcaggactaagtaagcacatgagtccttaacagtggaagagaagggggaaggaaagagccacagagacatgtggccatagaagaagggcccatgggatgcaaggttgctaatggtgagagtggagaagagcccaatgccaaaaaatgcaggcagactccagaatgtggaaaaggcgagaaaaaagatcccctagagcctctagagatgaaggtagcctttccaccacctagattttagcccagtgagatccacatcacactctgacatacaggagtgtaataaatttgttttatgccctgacatactggtagtttgttgtagcagcaatggactagtaatatataaatatatacacacacacacacacacacacacacacaaacactacccccccaccacacacaacataactatctatatatatcctgcccttcaaaactgaatcagataaactacacattagcattaacttagctgggtgtggtggcacatgcctgtagtcccagctacacaggacgctgagagggaggatcacttgagcccaggagtttaagatcagcctgggcaaacacactgaggccacatttcaaaaacaaacaaacaaaaaacacaacaaatctttgattaagctcatttcccaaatttgaagaggaaacaattattagataaagaggagaaaagagaaaggtagagctgctgacttctgtggtggaagcacagacacaggcccaaacatactcctgtcctcctggctttcctgtcccttctcataagggacacaggaacctctcaaactgaaccatggatcacagaaccatactcagaacgcaatacagttttgtctacaattttttatatatctgtgtccctgtctctgcctcccattcccaactcccttactcttgttagaaaaaaatggctattatcaaatatgagtacatccttatatactaatgccaactgatcaccagctggttttcttcttttacaaagtcataaatatttaggctttaacacatcttccaagcaatagaatgttattttccagttcattaacacaaattctatatctaaaatgaagacttcacaagttgatttaaataacatattaacgaaaatcgactggccatggttcaaactgacattttaattaaatgtgatgataggttgagcaacctagcagtactctaaaatgacttttggttatggctttttccatattatgtttaggctgaggcatccctaaatgattcaattgtaattccccttcttaaacatgagatttatctttacaaaataatttattttcttaaaattgcaagttaattctatagttcatgcatacataatctcagtagatatcagctgtatgtgtacacacatacatataggtatttgtatatacacacattacataattaaaaaaaaaacttattagcagggtacaaccacgaagacaaagaggctttgtgtaatgtgatggaaacacaattgcaggacaaacaacaggctgctgtgagggctgtatttaccctttctgatgtaagacttggaaaaacatggatactggatatttaatccccataacagaaaatttagggtgcagacaacttcccacaatttttacagacaatgtcaatagaaatgcattcaatgcagggaatacacagtgtgacagtatacaaaaataagcaggttgatggtttagatttatgagacaagagaaagaaatagtagatgatgtcataattctccttttatggagttatgaaagttcttcattttatataaggtcaggtgctttcaaatgtcaatgagaaaaatatttaaaggaagaatcaaatctaagatgtagagagatctttataaacgtgaacttcaggccaggcacggtggctcatacctgtaatcccagcattttgggaggcctaggtgggccgatcacgaggtcaggggatcaagaccatcctggcccacatggtgaaaccccgtatctactaaaatacaaaaaatcagccaggagtggtgacgtgtgcctgtagtcccagctactcaggaggctgaggcaggagaatcgcttgaacccaggaggcagaggttgcagtgagccgagatagcgctactgcactccagtctggtgacagagcaagactccatctcaaaaaaaaaaaacaactttttttcatgctgagaagatataatcatcaacacattcttgagcacaactatgcacacaggcacttccgcattcacaagccatgctgtgtgcacacactgatgcccctagattccttttttgaagagatggtctcttggtgtgtcacccaggctggagaggagtgttaggatcatagctcactgcagcctcaaactcctgggttcaagtgatcctcctacctcaggctcctgagtagcctgaactataggaatgagccaccatgcccagccaatgttttcattttattgtagagatgaaatcttgctatgttccccaggtgggtcttgaactcttggcctcaaggaatcctcctgccttgccctcccaacatgctgagattacaggtgtgaaccattgtgcccagccaccggattctttattaagaagaaaacttgtttgctgacatgtaggcaatgaattgatgaatagtagttcataaattactaatttacaagtcaatataaatgagttgagtaaacacaaaataacagcataaattaatgaacagtttacgacctcaagtttctttttttcctttaaaacattgctctgacagagactactacttgtccattccatggaaaagtcagaggtggttaaaatgtcagaggtacacttattaacaccttgctgccttttgtgtagcttcctctcagtacttcaccagttgggattgacacacctctccagctgggttcaggagccagacaggagcacacagaacagggaatccaaagccatctctgacaccaaaagcaatgaaaacaaaaataaccaaacatattatcaagaaatgaacaagagatcgatatcaagtacagcaaaaagagaagaaatcacttaatctgccaggctttcattctgacaaaataatttacaacacgcatgtctctatctgacatgtgtgaatagaaaaagaagaggtgacaatagagtagaggattcgtcttccaattgtctctgatctatccaacctttgttacacatcagagagttctccaatttataaataaacaacagagatatgtggcaaccaggacacagagacatactgagagtactgctcagctctctgcctaggcctgattctgatgatccctgacaatgagcactgtgaaatttacagcaaatcagtacacatacacacaaacacacaaaagagatacttcatgggcaaaaagcaccaaagatataaaataaaatgcctgaaagaccataaaacaacttctgatgaaatgctgttttcattttgcagtagtaaaatattcaccaccaaatctacaattagcttaaaaattacaataagtacagtacttttggatcccatctccaattcacaccttatcaacatgtaataatcacactgcatctacaacaaagctggatggactttatgtgctgaatacaacttgcacactaagaaggaaatttgttgaaataatgagaatccaaaatttgtatgccatgctctacttcacaagttaaaagaaaatacaatcatttctatttttaaaatgcattgaaataaaatacagaaaatacagtattctaataccagttaacattaagagaatatatctctaaaccaaagatcttggatcttctagaaacaaaatcagctggtatatatttggataagaaaaaaaaattaagagatcaagaaaggagagaagacgttcgcacagaatcatctccaaaaatggctttctgacgcattcgaccagttttcaagtctatttgtttttcctcctttggcatcaacagcctatatcaccaaggatatgcaaaataattcaatttgtacattaatcagctaatctagaagtggcaatatagtcaatgaaaatacaaagaaacagaaaatgtcaatgaattgcttaagatgtttaagatgacatagcgtagggaaaaaatgatctgataaacaccggaagagttaataaggaaactgaggcatggttccctaacaccacacttcaaaagaacttatagagagaataaaggaataacccttaaaaaaaaaaatctaattttagaaaaaaattgctcaaaagggaagttagggttttatagatcttctggaaagctgattaatttctaagctaaaaaaactatatgaagctttttaacgtagcacaatagataaaagtatgaaaacataaattagaaaaaactaaaaatcataccataagggatggataagttagaatacaggaataacaggccaggcatagtggctcacatatgtaatcccaggattttgggaggccaagtcgggaggattgcttgagcccaggagttcgagaccagcctaggcaacatagtgagaactcgtccctagaacagaacaaaaaaaattagccgggagtggcggtgcactcctgtagtcctagctacttgcggggctgaagcaggaggatcacttgagcctgggagttcaaggctgcagtgagccaagatcacgccactgcactccagcctgggagacaaagtgagaccttatctcaaaacaaaaacaaaaacaaaaacaaagaaaccacaataacaaaaaaacactggtaacaataaaatcatgattacataaagactgtatagaaaaaaaatcctcagaatatagaaataaaattacgtattttacctgtagctatattagaagagagtattcttgtagacaaggatgtctagaaggatacgcaaaaatgaaaacagctaataacactcattatgtcaggcactgtggtaggtagtttatgcacattgtaacaaattatatactacactatctcaaaattttcagataaattttactggaagtcataaatcaatacaacaaaatcagtgttttgcaaacatccactaagcataaaggtatacaaattcccaacccagactgaaaaataattcacataagccacacattagtggaaacctacccatgggagataatacaacataatctaaataaaactttcagagacaaggcatgtggcttctggacagccacaaactccctgactctgctctagtgtttcggccatcaaaagaaagccaagtggcctcaggtctctgaaaaaccaaaaaagcaacctatggaagatggcgtggtatttgaggaatatttgaagtctgttgaaaaatgcatcctgtatttttttcaagataagactcccttgtaatgtcaggtaagtgaagagccctcagagacacatgcacacacaaagaaaaacaaaacgacatagaatgaatcccaccaaaatgtgttatgatggcagaattatgggtgatatgatcttctgtaatatatctttttattaaaaatagaaaaaaagcagacttacccttgattatctatagcctctgacccaagtggtttggaattggaaagcagcatcactcgacttgaagccatcttggcatcaatggtggagtaggtggagatgagactctggaccagctcatgggtgagccccaccttgtcctatcaaggccaccaagaaagggcacgtgaggaaagcacaaagatcctggagagacactggtttcactcagtttctcaaaattatcttagacacatttcctgagaacctttcttaatgccgcaaacaccagagaagaaaatccttataacaaagcttgaaatggatccccatctccattaaacttttccaaagctcagtgagtatataacctgataacctaaacacctagctagaaaaacctcagttccagtgctacaacagtgctagcttttctaacatttttaagtaaccctgcttttaacccaataaaattcaactacagaactaagaaataaatattggaaatccactttaaaacaatgaggagaccactgtgattgagaaaaagaaaaagacaaacgagagctggaaagcacactgattttgtagaaacggaaataagccgtgcaggtgccacactggcagcagtgcccgcgctggggccacggatcaaggaggcatggaggacaggactcttctgcttggtacaatgaaaaaatggtattatttttattctacatattgacaatatgcatttgggcctttattataagtacaagagaaaaatcttcaataaataaaagctgagtacattactttttttgattaagaaatagattaggaaagaataatgagagttcagagcaaagactcctgcctcactgatgcctgaaaaccgtggctgccaccaaggtcaacacagacagcgtctttgtcatacagcacaccctcaactccagaaacaggcgcataaaccagctgctccttcttatttaaacagcacttcttttgttattcaggaagaacacaagggtctgggaggaaactgatgtcactcatggcaaaatgttctacccctggaagacaggacccaaaaagccagcttcaactgacaagaagtcagtaagtatctactgttgactggggggttaaaaacgatccacagtccaagggcttaacccatgaccctaaagaagggcattgtgccacactggaacagtgaccctctagctacaagaggtcagagaagagggattcggtaacacctttgcaggcctacacatagctggcttacttttaaaacctccagcaaggccatcttcccttgtttggtcatttttcacttttcctgagaaatgaagccatcccaagaatcctatgtgcaattctcgtatgttctacagcaagagaatacctggcatgtgaatttggcttttatttttcaagtgtgctcctcttaaataaccataaagtgacacctgcaggtcacatttgatgtttgtttggatatcctccgggtttgtcaaatcttccatcctagaaaaataaactcaatcatacagcagaaatgaatgccaaagttcctatacctcctttcatgtgtcaatgactcatcacactcttgtccattaagcacatcacttaggaactagaaaatgcagaaataaggaagcaccgttcaccatccagaagaggaaaaggggcaggcacacaactgtgtctctaggctgaaagtgacattcattccataagacaccagatgggagatggcgtccacctggggtcagggaagagtgaagaacacattcagaaaatccatttctcgaagagggtgagcctgtgctctgggatttgtactgtggcttggattctggcaggtggaaaaagggtattccaggctgagaaaatcacagcacaaagaagagcacaaaggaaggaaactgaaggcatgcacgaaggactccagcacccgggcacgaaggcagcatcactgaaaactgaggctgaacgtaggatggggccacatcctgtagtcttaaatgcttccaagtcctcccattttcctaaacatctcataattaatttactcccaaaggcacagcatctttgagcaatgatataagtagacattttccatcaactacacttctacccccactattcaaataggcacaaaataaatcctatcactgttctttttctagcctttttagctttgaaatatatggcccaggaagaaaaagtttacaatcaccttttaactgtctgccaggatataagggtgaaaagtttgccatgagaggcctaaacttcataactgtaataaaatggcccagattgtggatttcttggttttgatattctccatgcaccattccagaaaggtagaacagtttggcaacctaaacattaaaggaaaattaaaaattaaatttcaattaaattctcgtcaatactgcaacaaaataaaagctctaaacaagaagcaatcctaagaagggagacttccagcaaagccactgtcctgaggcttccagagccttgctggattctttcaggacttattagaaccacacagaggcagactgctctgcaaccaagccggggcatccatctaagtatggtgaggagagggaggtgaggcctctgagcacagaaacggttctgtggccgatggaccacagcagtatggaaaggaaggggcagtgcctggtcctgtaactgggagaaacttctgatgtactctattaagtcccgactccaaaacacccagacattgcctggtgcagcaggtacggagacaaatgagatacaccaagaggcccagaataaccactctcttgagggaaaccttccagagactgggaacacatacacaaagggaattcaggaggcaattcctagagagacgtttagtaatgtctcttcagtctttttgtttgtttgtttgtttgagatggagtctcactctgtcacccaggctggagtgcagtggtgcactctcagctcactccaccctctgcctcccagctttgagcaattctcacgtctcagcctccctaatagctgggattacagatgcatgccaccacacccgactaatttttgccttttgagtagagacagggtttggccatattgccctgagctcaaaactcctggcctcaagtgatccacctgactctgcctcccaaagtgctgggattacaggcgtgagccactgtgcctggcctctttagtctgtttttaaaggattatactgttagtttctaacaattatttctcttcctacctggtaaacttctgtccagaacctgtgttttaatcacttctttgtcttcttcagttgcttgttatgcttgaaggagtcgaggtgggtgagaactcccagaattttaggaaagccatgtgcttgacagatgtttagaaactcaaacatttccatttcaaacccaaagctggcatctataagcatcagtacctacaagcacaacacattatttctcgaagaaactaccaaaacagaccacctacactaggggttggcaactggcccacgggccaaatccagcccatcacctgtgtttgtaactaaagttttattggaacatagccacattaattcatttacatattgtctatggccgcctgtgcactacaactgcagagctaagtagctgcagaagatatgatccacaaagctgaaaatattcactatctggccctcaacagaaaagtcccactccagactaaatcaaatgactacacaggcatcacccagacagagaaaccaccaccctctgacttgctctaaaaggcaaccataagacaaggccactaggatataaacatccattttaagaattctaatgcatgagaagtaactcagaaaaggctgggtctaacctggcccttacctaagaaatcctaatttaaagaaatgaagttttctgtaatgtatttttaagccaaataacaggtctctgacatccaaagaatgggaagaaagtgataatcaatgaaatatattaaatacgtacagaaaaccaacctcttctttcaatctcctcacagaaaaaaaaaaaaaaaaaatctgtttttttgctgggaagtatacaatggaaacctctaacttgtatgttaatttgtataactcaattgctcagaaatatttgaaatagctaccagtttagaattaagtaaaaaaacagaaagattatgatgaatggtagtctataagaaaatataagcagataagaccaatttttttttttttttttttttttgagacagagtctcgctctgttgcccaggctggagtgcagtggcttgatctcggctcagcgcaagctccgccccccggattcatgccattcttctgcctcagcctcctgagtagctgggactacaggcacccaccaccacacccggctagtttttttgtatttttttagtagagacggggtttcacagtgttcaccaggatggtctcgatctcctgaccccgtgatctgcctgccttggcctccgaagtgctgggattacaggcgtgagccaccgcacctggccaagaccaatttttaaaatttaagacacttcaaagatgcaaaataatttcagaactgattcctggaaacttgtaattttaatattaaagatagttctgtttgtatctttccatggataactaaaaataacacaaaatggaaacagaaatgcccatccttgattaaactaggaaacattcaaaacccaaaaccacagaatatatgaagttgggcttgtaggaaagcacagctgccactgcagaccaaggcagcaagcagagctctccagcaacactggaccagctcaaagaacaggtggaatatcctcacaccacatctgatgccagagtgccaagggacaagcagctggttgtagggtcaggaataaaagggagcaaacagtccctcagctgccaatctttgccatctaagccagtgtcactcccctaatccacacacgcacgtacacacccaaatccacgtattgtgtgtgcctctgctgtactcaggaggctttgacaacccagagcagagcaatcaacataagctagactaaataaattatggtgcatccacagaatggaatgttatattaaaaagaaggaggcagagctacagtacttactgattatataccttcaagtatattacatgaaaagagcaaagcatagaacagtgtataaaataagctaccgtttgtgtttttaaagggtggcatgtgtgtttatatgtatctggaaggatatacatatacatatacatatatataaaggtctgcagggacctgagagaccagaggttacagcaaggaaagagaaaatgcgcattgtgtgtaccgtgcattacagttagagtgctttaccaaatgtgtgtgctccttttgaaaatcttaagatttacataggcatctctctcaatgatggttaagaggctgggaaggggagcagggagggagggacaaagagggaaaggttaacaggcacaaaaacacagttagatagaataaattctagtgtccaacagcacaatagggtgactataatttattatataattcagaataactaaaagaatgaaattaaaatgttcctaacacaaataaatgataaatgtttgaagtgacagatctctgaattaccctgatttgatcatcacacattgtatgcttctatcaaaatactacatgtaccccataaatatgtacaactattatgtatccataataactaaaaataaaaaaatgtaaatgcatctcttaatatgtatgtatttaaaattagaaacttgctacattttaaataaaagagaaacaaatgacttctatgaactattcaatcatttcaagtatacaagtttagtaatcgttacacaactttacattaattacacttatttttactaatagtagcattacatgttcaaaatttgaatgttatttagttttctgacattacaatggcacaactttaaaatctgtattactttttcctttatattttaggagtcttcctaggccaaagtataaaatctgtagctctagaaaaaactaaataaaaatgaaaaaaacaaggtatctgtcaccccacacttcctaatcaatatggcttatttttttgctaattttttttttttttgagacagaatttcactcttgttgcccaggctagagtgcaatggcgtgatctcgcctcaccgcaacctccatctcctgggttgaagcgattctcctgcctcagcctcctaagtaactgggattacaggcatgcaccacctcacccggctaattttgtatttttagtagagacggggtttctgcatgttggtcaggctggtctcaaactcccgacctcaggtgattcgcccactacggtctcccaaagtgctgggattacaggcatgagccactgtgcctggcctttttttttttttttttttttgccaatgtaaaagatagttcatagaatatcagaaatagtgaacattatcatttccataaatgcaagagcatgtacattttccacacgctgagtactgcctgaattttctattgataaactctgaccacttcttcaggcaattcatgtacttactttagcattatcattaaggatgaaggttctagaaccatcaggaacaagggtcccatcttcacacaagttacttaactgctgggaggctctatttcatcttatgtaaactatagataatacctactcacctcaagggtgtatgtaagctaaatttgtagaaagcagttagcacagtgccaggaagggtccaagaagaaatggtacttactatgatatatttgtacatatatatgtatgcatgtaaatgagctcttattagctgtgttcattaaaggttttctccgtcctgtgatctgcttttagattttggaacacatttcattgtgcacattccatttgtattattaatatgacaacatttattactattattattatcatcatcaattcaatcacatctactatatccctgataatgaccatgatccttttaataatcacaaaactctcttcccttcatcacggggtaaataacctatcacaatgctgtaagtctccatcagcaccccaggctgcccctgctcacttaccagatctgctactttagccagatcaatcatcatgttaatgtcacacccacattcaataatggtgagtctgcgctttttacctataagtgaaaagatgaaaattttactttaaaaagaccctgaaaaaactctaaccatcaactcttaattttcattttttaactgcatccagtaaaacaccacatacgtttacaggagtgtaccagaagttcatttttataggcaaaaactggtaaaataaattccatcctgtttttcttcctgtgttctaaatttagataatatcaaaagcctacccagatgaataaaagtgctcaaaacagggaaaattctgactagacaggctccacgataaccatgatcttgctgttcagctgcaggccaatgtcttcacctctatcaaaatttcctgtattcccactatcgctaaaaacatcctcaaacataatgcaacagaatatttacaatgataattatttctaaattaaggtaataagaaaatgatcaagaaaatattggctgggcacagtggctcatgcctgtagtcctggcaccttgggagaccagggcaggtggatcccttgagcccaggagttttgagactagcctgggccacatggggaaatcccatctctacaaaaacataaaaattaaaaaaaaggaaaaaaaagaaaaattagccaggcatggtggcatacactactcacaggaggctaaggtaggaggattgcttgagcctgggaggttgaggctgcagtgagctgtaatcacaccactgcattccagcctgtgccacagagcaagactctgtctcaaaaaaaggaaaataaaatatggatgcgccaaagataaagaaaagcctcaatccaactatattactgcaataataagagatttcagagtgtacattgccattctaccactggatgtttgtttcatcttccctcaaacttggaaaggtcaccatctcccaaagcagacaaattctcataggaaaaagagaaaacgcgcacttccaccagcatgtggcttcataagggcaagcatgtgcacctggcacataggaggtacgtgctgtctgttaaatggtgtgttcgcagtgaccaggcctgtcaggcccttccaaggaacatgcttggcaaagccatagagcagtcaggataaggtatgtatcacatccttatctctgggaacttatccttttatgaagttatagctaacttagtaaaagtaagagagaggtaacatgatatgacaatatttaacatgttccactcaagaaaacaacaaacacacgcatgtccctcagatgacaacagccacgccaagtctgtgtctgtggcggcatctcctacctgacacgatcgtcacagggcctctgatctcggtgaacttctgccaggtgaagttccgaatgaggcattatatcaaagtgctctttccaactttggaggccccgtcaccactaccgctattggtggcggctctagtggagttccatcaaccactggaatatgatgcttttgtgtcttcaaatccagagtcctatttatttaaaaaagaaaaaaaaagtaaactcacttttaaaatagagtaaaaggtatcaaccttataagtagacttttttttagtataattacagatatgagtactttagtatattttatagagagtacaacagacaatataaaaatataagtaacttgtcaattattaacttctgacccctatccaaatcaattgctgttcaataaagatgtaacaagatgacttcaatagtatagagttgaaaattaaacactccttaaatctgactgttttatgagtgatttttatagttttttaaaaaccaaaaggtaaatactgaggcagcgcatcataacagataagagcagaggttctggagttaaatttggctctccgacttactggttgtatgattggaggtaacttgttttcttgacctcagttttcttgtccataaaatgagggcaagaatgattcctactctggtaaggctgctggaaggatttagttgaataacgtttaaagtacactgctaagaatatcataaggactcactaaataaaactatgttagtattacatattgtaatttttgtattttatattacaactttgtaaaacatatccagagggaaaaagcacacttatcaccatagaaacagtttaaagtttaggaagaatcaaattctataaattcttgtatcttgggcaagaaacaccaaccagtgtgcagatgctggaggcaaggcagcttctatggcaagtcttctcacgttttagtaaaagccacacagcatgcatctccatgtcctttggagctggactagacttgtgaatccaaatgtcacctgtgagaggctcctaactatttaaaaagattcaatggaagaaccatcagactgtagctaaacacacctgtgaaaggatcgagacatccacacagcagactgaactgcaaaagcattggcatttctcttctgggcattttcttcgtctcctagctggagatcctgcagatgccacttctttttctttgcagctttgggtccactgtttttctttctgtgtttcttctggtccttagtctccatagtggctatttaccaataacaagtaactctaacctacaaggaagaaggttggggtaaggaggtgggagaagcattttacaatccaggcaatacccagggaaaaacattaaatttcatttatttctttatgaagacatgatgtatttgttcactgaacaagggtagaaactgcttaaccatccccaatttcatttctctctgttatgctataaattagatgagttacctctgctaaggttacattctatggttaagttactttttactcgtctcaagtgtcaacatcaccagtacctatttctgcaaggatggaaatattctatatctgtacttttcagccatttagccattagccacatgtggttacttaaaatgtacttcagagaaactgaaaaaatgaattcttaattaatttcattctaactctaaatagtcacatgtggctaccatactggacagctcagacctagacatcgactggactaacgaagtggtttcctaacttaaactaaaacttaaatttcaataaaaaatttaaaacgtttttatgaacttccaataggatcgcagtattacttttagtacctgttgactctaaaacttctaaattacagctcatctacatacatttgaaaaatagcaatatctgtatgtgtgagatatgactggttctagatgatgcctggaggccccatggacttacagagacccttccagtgatttctgaggtacctgggaatctgtggccaataaattggtagtcactgaatctgtgagtttttttggaatatcgggctgcataaaatctgacagcttgattgagaaaaagcggggcagggtgccatttcattcagttaaggtcctgtattcattccgtttaataaacgtttgtgtctgtctatgatgtgctagccactgtgccagaaaatggatatagctatggtctgattgacagaggaaatccaaactagtatcttccgtgccatgcaataagagctacattgcaaggctgcagagggtgctactggagcacagaagtgagtcaaaggcttcccacagacacacacacgagcggaaacagaaagtctttatatatcaccatatgtcaaggaacactggccgggagttaggagagctgggcactaggaacgctttgaaactgaatagctgtgtgatttcagaggttatattgcttgtctactatattttactgccgaacttgtactgtttctctcccttttcttcttggtgggaaaagcacaatttggggtcaacagattcggctcaggtctaagtcgcctgccgggaccacgtcgccaggaaacgacgtctccccgacaccttccctcccagtccgggctctctgcagggattcatcccgtcactctcccaacgaccctcgggcacacctcaggcagatgcgaaatatgccgctcctggggagcaaagatgacccggaggaccgggggagtaccttcccacgcgcacgactcgcgatcttcccagtgccccagagccacggacccaaccgccgcctaccccagcccgcggcacctaacctgttcacaactgcgactccttaggtccgcttggacaccgccggaaacggaaattcaccctcgcgccgactcgccggaggtaaacaaaaaggcagaaaaaaagggaccgccgcctggacgacttgcaggggacagctggaagaaagactcgtcaacggccgagtgctggcgccggcgccgtctgcgcagtgcgttccaccgggtccgcgtccctcccgattcagccccaccccgccctcggaatccgctgcctcagctcctgctgtggcactccccagcagcttgcacctcgctcgcggagtccttgctgaaggccagggcagctgtgcggcctggcgcgggttacttgatgccgtgcaaaagccaggagacacatttggttctggccgccccggagtcaccgtgcccggggcgaatggactatggctggattgggagaccacttcctcctctgtaaagatgacagacgagggagatctcacgttctgggggtgccctatagccctcttttggccagaagcggtggatcacgcctgtaatcccagccctttgggaggccgaggtaggaggattgcttgagcccaggagttcaagaccaatctgggcaacatagggaggctacgtctctcaaaaaataaataaatacataaataaataaaaataaagccagcgtcgtggcggggcgcctgtggtccctgtggtcccagctactctggaggctgaggcgggacgatcgcttgagcctgggaggcagaagttgtagtgagctgagatcgagccactgcactccagcctgggcgacagagcaagacactgtctcaaagaaaaataaataaataaaataaggccctctttttccgggaccaacagactctgagggcagggacaaactgacccagcctaaactgcctcgccttccctgctcccgggaaaggggttttccctgagggaaggtagcatcttgccattttcttcctgcacagctttgccttcccagggatccacccattgccacctgaggaaatgccttggagcccatctaatccccagcccagctacttgggacgcctacagagactacattgtcagaggatgcatcttcctctagtcttggagggtttcttttcaatatgatcccaccggtgcatgcaaggctcaattctacatcaaaaaactaggcccactcctgtcgccgagacccccaggcttcaggtcctgtcacagtgaccttgttatcacccccagcagcccccaggtattcactctgcataggctatatactgggtgctgcactagggaggctacctacgtggcgcatgcttcccttatccctgaagagcttaggatgttgtaacttcttcacactaggcctcttacttcttggagatgtcagtatctgggtaaataatccttctaacatccttttggtcttatgaagcccattcttgtcctctgccctacctcagcttccccctccctccatgatcagaccttagaccttgtcaggtccaaggactgcaaccctcacagtatcccactctgaccaccacctcctatctagagcaatggagagactttgtaggtgaaagctgtctttgctactggttctcctatgctccctcgcctggctcctgcaggcggttgacttcaccagggacacagtggccagtgcccagcaggtcccactcctctcaccagctccaggcagttttattgtagagtaactcttctgagacaccgctcctttccccagcacctaaggaagtatttctagtaagttccagtggtatagcatcggtgactctcccgacaagcagagggccatggctgggttcctctgatgaggtgcaggggcagggcactaagaggggaggactctcctgagttctctacctgagccctagactagtagctgctcctcctatacttcctactagtctgtgcctggttactccacttccctgttgcaattaacaattccctatgtacacttttcctgttcaaatgactgtgtggcttctctttcctaatcggactctgaccaatacgctatcatttgccaacaactcccaaagttttatcagtgactcagacctctaacctgaactccagctgcctccatgagatatccatttggatgtttaatggacatttccaaagtgatatgccctacagaactcagaatcttccctctcaaaccaactgctcagcagtcttatgatcttagttgatggcaattcagaagtgaattgcaggacacccggtttgtatctgcagagagaactggagaactgcttagtgtggaaaacccacacatttggtttcagaagtgtgtgagtagaaacagttttccttttatgtttgttggatggataatgatgaacctagcaggacacagaaagctaggcagcagtggaactgagaatgaagttatagttaatagcagagaatgaaaaagaaaagacagataaaacattttgaagaaaggacagtaatgtattcccaacaggtaggatttacaggatggagagaagaggcaaagataactacaaaatttctagcctgagagactggtagaaaaaaatggtggtatcaggaacagacaggggttattaagaaaaaggattggatttttaaaataaagaagatctggtgtaaaattatcctcaggaaaactggaaaactaggcatgtacttctctccatcatgcccttgcacagtgcagtccttctgcctgtccatgcctcgcctccccctccctaggattcctcttcctctcttaagacccatctcaaatatcacctagacttgtaagtaatttacatgaaactggatacctgaggtatccctttgaaagtttttaataacaagttactgttatcttttactaagtccaactttatattcgccattttaactagcatcatttctgtttccaagaggtatttggtgtgaaagtgcaactaagtttactgttaatcaagatcagaataaaagaatctaccaaaaaaattaacaagatcccccttttaatgcataatctttcatccatcaggctgtaagttaaatacctaacataaaagaaagctgtatgttttatggatatgtacatatataactgcagggaatatgatttggaaggatgtacacttagagaagactggagtcacaagtggtagtcaagggagtcttcagatttctttttgtatttcaattttgagagaaatacatacatatgtattataattttaaatttttaatgaaaaaaagtatttttccttttttttcttgatctgtcactacattatatttttccaatatcagctaaacatttgcttcccagaaagcttagttgtcttttcaaaatttattcaggttaaaataaaagatttagacaatgaattaaaaatctaagatggtatttgcctactttatacagaacagtacattgatgctgctaaagcaattaaagtataatttttctttttttttttttttttttttttgagatggagtctcactctgtcacccaggctgaagtgcagtggtgcaatctcagctcattgcaacctctgtctcctgggttcaagcaattctcctgcctcagcctccccagtagctgggatttcaggcgtgcaccaccacgcccagctaatttttttgtatgtttagtagagacagggtttcaccatgttggccaggctggtctcgaactcctgacctcaaatgatctgcccgcctcagcctcccaaagtgctgggattacaggcatgagccaccacacccagcctaaagtgtgtactttttcttagctcctatatgcagtgctccttccccatactgaatgtctgaatttttatctgagacatagtatttcagatggtcattacttacgggtggtcattaatagttcctccctgcttctaaccttcctctcctcattttaaattaaattacgctacattattgtggattagaaagtacattaatattaagtgaaaaaatatgatctgatgagtaagtggcaagagtgttaacgtatgaatattaagagttgttctgaggcctttttgcttttctgggggttctgtgcttgtggtagaactcttggttattttataaatagttcctgaaaagtgagagagtacagctggaaatcagatttctgatgaataaatcaaaccctattaagagaaacaggttcaagtaattttaaaaccatttgaattttcataaatgttttgttaatgattaattataaaaaaaaacagtgactctagctggaggcttttgtgtgtttgcttttgagtcagctaggaaaaggaagaaaaattcaagcttagtcaattgtggttttcactgaatcttttttaaagtaatgagctggtttgttttcttcatcactatagcaacttaagctagtttttgcttttgatttttatttctcctagagaaacttagcatgcactgctcattagacttgggcatactaaggaatatctgtggtaattaagttaaaaatcagatcagtgctttgtgctgtgtatagttgcagatgtctgcatttcactaatattctttggaaacatctggataccagttaacataaaataactgtttagttggtttctgttcagaatagaaggaatgacttaaaagttcccattgtagtacatacgtcattctatccctagcccttcctccagctttactgagattgataaataataaacatcatgggtggtgtgtctttagtttcctctggtgagctggatgcacagattactttgtcagcagggtggtcttgatttttaggccatgtgtctaatggcatcagctctgtggccgacacctgtgtaccaagcccattcactatctagcttagccagccgtggactcctgctctttgttaaaagtatttaccttcattcctactagcacagttgaccaaagacccagttgatcccaaacactagtaatgcatcaatggagtctaacagagttttaagatgtgtgtgtgtgtttgggggtggggggtgtagagatgggatctcactattgttgtccaggctggtcttgcacacctgagctcaagttctcctgcctcagcctcccaatgtgctaggactacaggcatgagccaccatgcctaaccctctaagactttgggatacaaaaacataatttactttccttcatttctggaataaaacatctcttcttcctccccctactttctgttctgtgcccctgtttgatctctgttggtcctgttcaccttcagccttctctgctgaaggaggaaaggcttggttttataaaaagtgacaatattcagaccacataagatccttcttgcttcattttggattaaatattttaagattttctgattttcttgtatgcatatgtatttacctattatttgactttattgaataacttcaaattgagtatatttgaatgggaatgggcattaaaaagtgctaagctttccctgcctttcagaactttgtatgtatatgtcacatcattttgtccttcacattctccagttgtgctaatttttcccaatccattaagtagagtaccttcctttttggagtcttacttttttttttttttttttttttgaggcagagtctcaaaccgtcgcccaggctggaatgcagtagtgcaatctcagctcactgtaacctccgccttagcctcgtgagtagctaggaaatacaggagcatgccaccacacccagctaatttttgtattcttagtaaagatgggggtttcaccatgttggccaagctggtctcgaactcctgacctcaagtgatctgcccagctcggcctcccaaagtgctgggattataggcgtgagccaccacatccggcctccttacttaaatatcttaatgtgccttagaatgtagttaagaattttcaggtgacagtatatttttgatagttatctttggtttccaaacccagagaaggaagagtaactggctttttctctgtgtgggtacattgtgtcttattggagattgttttgtctcaagtattgctgcagactattttattaatgggtgcaactttaaaatttttttttttcagattaacggtttaggtatcccagtactcggtatttgccaatttctagaattaaaaacatgtgtgtatcactggttaactagaaatttaaaatgaaaatgtttcttctttagcccaggcaatatcacttgcattcacttctatcccctccttgtccctactctgttggctccagggcttcttccactaagctggtactttctttatacctcctgtacttccattcactgaacctttattggttcatagcctacagaaaatgcctgtggtgtgagaggtaatttgtgaaactgcttctcttcactgtttagcaggttgagctctctaaatgggtgtagctgggaaagaaaatttaactttacaaacaagaattcctgggttccatccagtggaacatgtcttttgttatacacacacagtttctgactcatatcattccatgacttatgataaaatggacattctgtttacactgttgtgtggaaggaggggtctggttcctaatttttagtaacatctatttctagaatattaggcttgccatttgaatgcttctgtttgatttatgaatatcattggttccagcagtttttagctccctgctaaatgcaagttaaaatttttaagtttctaagttaaaagaaagtaacttttcctccacttaagaaagcaaggaaaattaaaaataatgtagtgatgacttccacaggctctaaaagagcaatgaaaaaagtgatttatgtgtgggagaagaaatactagttcttaattaatacattgttttaccacttcccgtgaatttatgtagaagtaatgaaaccaaggtttaagtcatttgttcaaactcctgtcagtttagactttttaattgctttgttacatgccattgctttgtaatacttgttatagcagtggtaacagttgagatttgcctgtttgaccacttgcagggcaccgtgccagattccccatgtgcaatgttcctcgcagttgtgacgcccatcgtaggagggcggcgttagcacccctccatgcaagcggatggtgcaggctgggtcgcctgggcacagcgcctgactattttcctggcttagtgtagttatcattaaatatgtggtattacttagaagcattttgaataatttgaaaagcacattttagtgttgaaacaatttttttttgagaaaaggtctggctctgttgctggggtggagtgcagtgacctgagcgtagctcactgcagcctgcaactcctgggctcaagcgattctcctgccccagcctcctgagcatctgggactacgggcacatgcccccacacccaactcaattttttttaagatacaaaggattcatcttaatattatttacaatttttttttccttttctgtgggcctcatctgactggaaagcctttcaatttttttattttttaaattgtaaattgacaaattgtagatgtatatttatgaggtacaaagtaattttatgatttatgaatacaacattacataattaagtcaagctgattaacctgttcaccactggaaacaattgcaaatcattatcattttttctggtgagaacatctgaaatttactcagtgattttgaaatgtgcagtactttttgttgttgttgtagaaatgaggtctcactatgttggccaggctggtttcaaactcctgagctcaagtgatcctcccacctcagccttccagtgttgggattacaagcgtgaactaccatgttgggccaaatgtgtaatctattattatttactgtattcaccatgctgtgcaatttatctccaagaaatgtattcctcctgtctaattgaggctttgtgccctttgaccatcatctccccgtcacccccatccccaatgttgtatactgagtcctttcatgatatgtatggaggcttatggtaagttatttaaaagtacatgtatgtcaaaattttttgtggccatagcttttctttctttttaaaattttaagagtcagaatattcgtatattaattcagcatgtatttgagtgcctaatgtatgccattttctatgttaggaaccaggaattaaagcagtgaacataacaaagtctgccctcgtggtgctaacttgccaggtagggaagccagatactaaacacatgtataatgcaaagtcagtaataataaacgatatgaagaaacaagtaaggtaggagaggcaggaaagtgggagtgagaaagaggtgctcttttaaatacagtggtcagggagagcctctcagaatgaagtttttaacagagacctgaatgagatgggggagtcagctatacagatatctgctgtgtgctagaaaaattacctgtaattttgcattctaaaagtttaatgagtacatttatttcacaatttgagaatcaattatatacaagatatagttgtaagcacatactcccctaaatataatttgtttttacagtagaccaaataagtatgttcagcttagaatatgctctttatgatctgtataataaatacattctcttaaaatattattaatattaaggttgatgttttcagaaacatataaaaaagctagcttttaaaattgactagggaagttctctcaaactgccagtccctgagatattgtatattttctatctgaaaaacttttattctcagaattctttaaaagagctgtccctgaggctcccattacttacctgtgactcccagtggaaatcgtacccagcccctcgagaggggctgaatctgttgagagtgggagggtagaaaaaatgctgcagcttcttgtgggtaaacttcacacacaaacacccagtgccccaagcactgtgcagtcaaacatcaaccctgctcagactttcctccttgggattgagaagcaatggattatagagaaagaaaggtggcttagcactccaaaacttggaagggtaattgaccaagaccccccaaagccaaagcagtgggcatccccactttctgtataccctataccaacacgtaatggctactagatacaggggcactagtacctgtctgcttggctacctccccttcttgcagaagtggtgaaggcaatcactcaacctcaggaagggaaaatggctttctcatcttcaaattgaaagaggttggcagtgggtgaggagaataacaagtaaggatctctttcaatatacccatttgaagccaaaacctctgtttagacatacggtattttgaacctggtgactattcattgaccatgtttgtgaattatcagaaagcagaattcttgccaggcatagcggctcatccctgtaatcccagcactttgggaagccaaggtgggaggatcacttgagcccaggagtttgagaccagcctgggcaacatggtgagatcttgactctacaaaaaattcaaacattagctgggcatggtggcatgcacttgtggtcccagctactcaggaggctgaggtgggaggattacctgagcccaggaggttgaagctacagtaagcagtgtctgtgccactacgctcagcctgagcaacagagcaagaccctgtttcccacccctacccaccccctaaaaaagcaagctgaattcttgaactccctgcaaccaggtcacgcaaaccaaaggtaaaaggaacataaaaaagccttctggaaagtgtacagaaattcattgcagggtgatttttgtcttgtgaaatcatagttactgttattagcagcttttttaaatgttttatattcattttttatggtgttctgatgtatgagctgcttcaagtgtttttggacatagcttgggtataaaatgtaaaaagtggatattttcaatttgtagctttcttttttgaaacttactgaaatttgttctaaatatatctccttctttctcacccaccccaacacattttttaaaaaacaccaccaggtatccgttatagcactgatgtgagtgtagatgaagtaaaagctttggcttctctgatgacatacaagtgtgcagtggttggtaggtgatcgcttttcttgctacctaatgagaactctggggaaatatgtttacacacatgttactgttaagatgctatagaaatataccttatcagaactgatttttttttaagttgtactctttaagacctgcatcatttttcaattactctaaattaagatatagcctttttttacgggagggattttttttacgggagggagctaattggattttaagtctagatctttgttttcaattcctcaacatattctataaataagaccaaattatagtagaaggagagtaaataagctattatctttttaaagtggtgaagagcactgattaaatatatattagagccccagcccccgccccagctgcgcgggcccccgcctggcccatggactgcacagcccagcgggcgccttgagcgcggtgcgggtcctcggagcacccccgaggtgagcgcaagcaaggtccggcatcatgtgctaggttattcccagtgcgaggccacacttgggccgtcggagcagcccctcctcacttcaggggtcaccctccccaagacccattgccccatcatggccggggaccggctccccaggaaggtgatggacgccaagaagctggccagcctgctgcggggcgggcctgggggggcctggtcatcgacagtcactccttcctggagtacaacagctggcatgtgctcagctccgtcaacatctgctgctccaagctggtgaagtggcggttgcagaagggcaaggtgaccattgtggagttcatccagccggctgcacgcagccaggtggaggccactgagccacaggacgtggtggtctatgaccagagcacgcggccgcagacagcttcctctccatcctgctgagcaagctggatggctgcttccacagcgtggccggctgcttccacagcatggccatcatcacggggggcttcgccaccttctcctcctgcttccccgacctctgcgagggcgagcctgctgccctgctacccatgagcctctcccagtcctgcctgctcgtgcccagcgtgggcctgaccctcatcctgcctcacctctacctgggctcgcaggaagacgtcctgaacaaggatctgatgacgcagaatggaataagctacgtcctctatgccagcaactcctgccccaagcctgacttcatctaccagagccacttcttgcaggtccccatcaacgacaactactgtgaaaagctgctgccctggctggacaagtccatcgagttcatcgataaagccaagctgtccagctgccaagtcatcgtccaccatctggccggcatctcctgctgtgccactatcgccatcgcctacatcatgaagaccatgggcatgtcctccgaagacgcctacaggtttgtgaaggaccagcgcccgtccatctcgcccaacttcaacttcctgggccagctgctggagtaccagagcagcccgaagctgctggccgccgtgcagggcgacgcgggcaccccctcaggaatgcaggagcctccccccagccctgcggccggggccccactgccatggctgccaccacctacctcagagaccgctgccaccaggagtgcggctgccagggagggcggcccgagcgcgggcaggaagcccccggcgccccccacggccaccagcacgctgcagcagggcctgcgcagcctgcgcctctcctcggaccacctgcaggacaccagccgcctcaagccctccttctctctggacatcaagtcggcctacgcccccagcaggcggcccggcggcccgggcccagcgaccccggcgaggccccgaagctctctgaaagctggacagccagtcggggccatgctgggcctgccctcgccctgcccggacgccgcgcccaggcacacccacggcccggcgcgctatcccgcgcgcggcctgaacttcggctacgcggctgccgggccctggccagccggccagccccggagcctggacgccaccgctcgactccctgaagcgtcctcggtgcttcagccccgagggcgtgcaagggccgggcagggtgctgtttgcgcccttcggccgggcgggcgccccggaacccaacggctgcagcgacctgccacggcgggaggcagcaagggctgagcccgggacgcgcggaccagctggtcagacgagctggccccggattcgcacttcaagtgctgcagctgccagatggagttcgaggagggcatggtggaggggcgcgcgcgcagcgaggagctggccgccctgggcaagcaggggagcttctcgggcagcgtggaggtcatcgagatgtcctgacccctccgctgccctcggctccgccgcccgcagctgggcagttataaatatatattatatataatgcaaagaaaggcaaatggttttactgcgatttttatccagaagtaaatatttcgattttttatttatttaagctgttcattctggcactgatttggcaacagtgcgggtggtcctcgagctctatttttactgtctggtatttaaaccgaaacacgcgtttctaagcaataagaggccaccttcagtcgcaagttgcaggccaggcctggggcccctccctgttcccccgccccaggaaacactgctgacatttgcagaggctgccgagctttcgtgaactttttacacaagagaaagttgaaaaaaaaaaaaactttcttgccacaaaccgagccgcagaaacacccttcttcccccacccaccgcccctgctctctcccttcgggctccgccccaaagccataggctgggggagcaggacctggtgtgccccagagaggtgcggccagccctccaccagctctaggcaccaaatcttggtggcagggagggcaccccgctgcccgttgccccagagctgttccctctcaggggaggacatgcattgggccccatggtgccagggcgttgagaggggctgaggaatagaacagtgtgtgtaggggcttggggcagggggttctggagggtcagatgaggcggagcccaggggaggatgggggtgttattaatgccccaactcctgccagagccccagtccagccactgagtgcctcagaaaggccattcccagagggctgcggccctcccttctcctttgcccctgcccccagagctacctgactggcagggcggcactactgcaggagaggagcttggcctccgggggtcaggcaggaggggggcctggctagcctgtgctggctccactgggcggggagccctggaccgccaggtatgaggagggggtgggcttagggtcctgttccaggtccgtcccccacctagcaaggccccaggcaggacttggaaaccaggtgtgcacctgcaggctgaggggctccatgagcaggtgctgcctcgcacagggagttcaggcgccagccaagcccctgtgcttctggggtaggcctgcttcacttagggagcgctgcctcaaggcagataaagcccccttgttgacccgacctgcatgggggcctctcaggagagaaactctcgtgcgcccctttcccagggcgccctctttctagacagcattccagcccccaaacacaggtggcttttgggcccagatgggtcagcctgctgctcctggcccataccctctcaggccgttgggactcctgcccttcagatgtcctagggtctaggagtgggccagtcaccctgggaagaggccaggggcttggcaggaggggcggcccaggcgggacccagtcctgagtcctggagcagggccagggaggcgcccgccccaccccagccagccgccttctctgctgtttcttctatttgttcttcttttcacccacagccttgtgttcctgtcaaccctcctttcagcaaaagtcctgttcccgttccctctgtccccacccactcctgttccccaagaaaataagctatcattgttgcatttgcaatctatggattagaggtttaagtatttattattattggttaattattattatgttttatatatatatattagaacttggctagccaattttattgaacaattcctgttcaataaatgttgtttaaagtacagttgagaaaacgatggtaggtttatttcttgaactttcagaaattcaagcttaaagcatcacacgtttttctaatatcatgtggcgctttctgtcattttacttttttaacctttatatggaatagcaaccatcaaccttctctttcagatgtgccgtttgggggtgctaaagctggtgttaagatctatcccaagaactataccataagtatgaaagtttttgtttttgtttttgtttttgtttttgcttttttgacacagagtcttgctctgtcgcccaggctggagtgcaacggtgcgatctcggctcactgcaacctccgcctcctgggttcaggcgattctccttgatccagtaactgggattacaggtgcatgccaccatgcctgactaatttttgtatttttagtagagagggggtttcaccatgttggccaggctggtcttgaactactgaccgcaggtgatctgcccaccttggcctcccagagtgctgggattacaggcatgagccaccgcacccggcctcaaagtgatatttgtgcacacagtgcatttatgaaggacttgaaattactgggcttctctgtatcccccatatcagtgaaatcaatagtccccattgcttttcaaatggaatgaaaaaagtaaagaattaactcattgagtgttttgccatataaaggtcacctacttaatatctatatcctttatcattttctgttttgtttggttttgtttttatgagtcttgttttttttttttttttttgctttttgtattattattttcttatttaaaaggtaattaatatcttcatattattagacacctatacccatatttaagaagtactgtgatctggctgggtgcggtggctcacgcctgtaatcccagcactttgggaggccaaggcaggcggatcacgaggtcaggagatcgagaccatcctggttaacacagtgaaaccccgtctctactaaaaatacgaaaaattagtccggcgtgttggtgggtgcctgtagtcccagctactcaggagactgaggcaggagaatggagtaaacccgggaggtggagtttgcagtgagccgagatcatgccactgcactccagcctgggtgacagagcgagactttgtctcaaaaaaaaaaaaaaaaagaatcactgtgatctaattagccaggcatagtgacgcacacctgtaatcccagctactcgggaggctcaggcatgagaactgcttgaacccaggaggcagaggttgcagtgagacgagatttcaccactgtattccagcctgggcaacagagcaagactctgtctcaaaaagaaagaagaaaagtagtactgtgatctgaagtttttaggtcaggatctcatgctagtgacaaatatcttaactaagccaataaaaaccttactttttatcctgtcagttccaagtaaattcaaactggttgtcacaatgctttacataatactaaattatctatatacaaacataaacagatatgatttttattctctttaaaattcaccatttagatggaatataattatattacaattaatcttaattaagatttggtatatttttcagtggggaattaatagaatgggaatttgagtcctggttctactatcttgtttttataacctacttttttgatcccttattttctcacctttaaaatggcattgcctaccttatgagttgttctaaggatgagaagacatgaaaatgtactataaatagaaaataagatgctagctataatctcaagcgatttttgtatctttttttatttttattgttttcttattttacaggataacgaactggaaaagatcacaaggaggttcaccatggagctagcaaagaagggctttattggtatgtgtagccacatagattttggcataaagtgggaacatctaaaaaaatctttttttttttttttttgagacagagtcttactctgtctcccagactggagtgcagtggtgcaatctcctccacctcccgggttcaagcaattctcttgtctcagcctcccaagtagctgagactacaggcatgtgccaccacacccagctaattttcgtatttttagtagagatggggtttcgccatgttggtcaggctggtcttgaactcctgacctcgggtgatccacccatctcagactcccaaagagctgggattacaggcatgaaccactatgcccggcctcctactatttgtgataggagcttttgccaaacatacaacatttttgaagacactgatcttcgtttgcttgatgtcttcgtatcttactattatctgtgtttatatgttctttgtgtgtgatctgaacattctttcctatgatatgtaaatatttgtcatttaccttctaattttcaggcagtttaaacctctctatacatatatttttaatctagaaggcttctaatttgtttgaatagaatatacataattatttaataaaatgcttgccctatcagtatagttaatagaatgttaatagttacttaataatataatacttgccctatcagtatcagtatagttaaacaaaataaggtctacttaaataggaaataaagtgtatttttctctactttctttctcagcatttcccccaccatggacaaatgcctatgaaattaaactataaagtctgggcatggtggctggtgcttgtaatcccagcatttttggaggttttggaggctgaggtgggaggatcacttgagcccggaagttcaagaccaccctaggcaatatagcgagaccccgtctctacaaaaaatgaaaatgttatccaagcgtgatggtgcatggctgtggtcccaactactaagatgggaggatcccttaagcctgggaggttgaggctaccatgagctgtgatcatgccactgcactctggcctaagtgacaaaacaagaccacatctcaagaagaaagagaaaagaaataaagctattcagattcatttttaggaaaaaagtcatgaaataaatgtcatgaaataacctaatatagaaatacagtaagtataggtaactctaaaacttgactagatttggcctgtctttcataataaaaggcatttgggcctttgacgtgccgcatacccagcactactgtgaatttgtgcatcattacgaggagcctattaacatgagtgaactatctcactcacacttttataggagtacctaccgattctgagatatggtgaattgaagtcatgttcagcctgttaatagccttcataattttcaaaaggtctttcctcctcacctaaatctcaaacacattttatagtcttgaatggtttcagactttattcagtcatatttatcgcccatatctgcaatatctccagctaaattttatcagtcttgacaagtacctaataattccaaaggtcaaaaagtgattcattggaatactgaaagaaaacacagcttaaactctagtaacttgatttatttgcctaattcgcaaaggcctcattgacccatgatgcagctaaattgacgtcttggcccagacagctttgaagcctaggaggcaggcaaagggagttttttctctcacttctcggcaaaccttcaaattcgatgctatttatctgttatttcctgacactccacagagagtgtcagattgaggctcagacctgagcctgagccctgatcctatcacatgtgtgtttagcatcagcttgtaaatttctacaaaacaaaacaaaacaaaaaaaaagaggctgggattttgataggaattgcattgaatctgcacaccaatttgtggagtattgccatcttccccaccctccccaaaagggttttgccctttcacccaggctggagtaccaggcagcagtcactgcaaccttgacctcctgggctcaagcaatcctctcacctcaccctcccaagtagctagaaccataggcgtgcgcaactgcacctggctaactttttaattttttgtagagacatggtctcatcacgtatcccagactggtctcgaactcctggaatcaagcaatcttcccacctcagcttcccaaaattctgggattatgggcatgagccactgcacctgaccagtattgccatctcaaccatattaagccttccaatgctgaatatgagatgtctttccatttatttaggtctctgatttctttcaatgatgttttgtagttctcattgtagaagtcttacaactaagtattgtattccttttaatgctattctaagtgacactgatctatcgttttcttatgatgtctttgtctagtctttgtatccagacaattctagcctcatggaatgagttgaggagtgttccttcctcttctgtttttggaaaagcttttgaaaggtcggtgttcattcccttgtgtgagtgtaaatatcacctatgtaaagttctgcaggaccctgatgtctccacccttctcatccccttatatctctgtgcaccaaaattaccctttcatctcctactctatagtcacatgctgttagaaaagttgcttttttaaaaaagatgaacttctgcctcagaccgtgctctctatataagaatttacctgttaggccagtcgcggtagctcatgcctgtaatcctagcactttgggaggccgaggcaggcaaatcacctaaagtcaggagttcgagaccagcctggccaacatggtgaaaccccgtctccactaaaaatagaaaaaagtagccaggcgtggtggcgggcacctgtaatcccagctactcaggaggctaagggaggagaattgcttgaacctggaaggcagaggttgcagtgagctgacgtcatgccgttgtactccagcctgggcaacaagagtgaaactccgtctcaaaaatataaaaattaaaaaaaaaagaagaacgtatctgttattcaggagctacttgtaatctgtgcatcccaatacattagttttgtatggagcagaaaactagtaagcctaataattgataccttgtgattttgttttgggtgggtgaagctgtttcatgtttaacatgtatagactgtttttgagaaggattttatcattatatgtttgtgatttacaaactgtgtgcttcagacttgccacttgccagagcccttctccaattggaattgttttttgtttttgagacagtctcactctgtcgccaggctggtgcaccgtggcgtgatctcggctcactgcaacatctgcctctgaggttcaagcaattctcctgcctcagcctcccgaatagctggcactacaggcgcgtgccatcacgcccagctaatttttgtatttttagtctacaacggggtttcaccacgttggccaggatggtctcgatctcttgacctcgttatccacccaccttggcctcccaaagtgctgagattacaggcgtgagccaccgtgcccagccagcttttttgtttttaaaatatattgtttaatcaagatgggatctcactatgttgcccaggcttgtatcaaattcctgggctcgagccatcctcctgcctcagcctcccaaagtgctgggattacaggtgtaagccactgccccagcctagttggaattgttgtttgaggtaacaagcttacttaatcctaaagcaagcataatactttcgtagatgcctctagaaagattcgggaccaatttgtcatttgtacattgggagaaaaggagtggttaaacaaagttttactgacctccagcagaggtatgtcactaaaggaatggaaagtgagcaaacaggagctggagagcaccagagagcccttttgtcagtggatgaggctagaatatggcattaatccttccaagtgctgtgtggggttagacttctcatgaaggataggtttgggtaggttagacttcatgagattttttctgtttttaagttttttgttgtccttgttgacttcatgagatttttaaggtgactaagggaagggtgctaagacatagagttacagattaggtgggaggtggagagggttggggtataaaaagcagtccttgaacatttcaaagttgtcttataccagccctgtatccaatatatcacatcttgttcaaagaagttgattatctaggccttgggcccctgagttaaagaaaaacattacagtatactgattccgtcgactaaaaagtaaaatttataggaagaattgagtacagtccttagaaagaactttaattattttatggggggacataatggtttaatagtttaacctctttttttttttttttttttgagagacagagtctcgctttgtcacccagactggagtgcactggcgcaatctcagctcactgcaacctccgcctccagggttcaagtgattctcctgcctcagcctcccgagtagctgggattacaggcacttgctatcacgcctggttaatttttgtatttttagtagagacggggtttcaccatttggtcaggctggtctcgaactcctgaccttgtgatccactctcagcctcctaaagtgctgggattacaggtgtgagccacaacatccagcctaatagtttaaccatttttaaagttgtgtttttctttttgtaaagatgagtttctattatacagttgaaataatatagaaagttataaacaatatatatatggtgggtagaaagaatggggaagagaaagaaaattgtaagtgggaacatgttatacatgttgtatgaaacctgcctttttccatatgtatgtttgtgataattccaagtaatttacatgcatatgttatcctttttaatggctgtttagtactttgcataggtataccatagttcatttaattgacatacaagataattagattgtttttatttttactatgtttgagaggagtatttctgcacctttacggatttgagtgagcatcacttaacatgtttttatcagagatcttactgtagccgtcagtagtagtgcagtcagtgatttctgttattgcctgtaagctaatttgttagcctaacacttcaatttgctatgatctgaggaactgaaagctaaggcctaaaattttatatgtgctaagtgtcgaataataggtcaaagctgcattcttccacaagtaaagataatatggggcttaacacaattgctttagcaatgtgattttctcccctttttctctacttggtaaggagggcttatacccccactaagcaggcacatgcctgtaatcccagctactcaggaggctgaggcaggagaatcgcttgaacctgagaggcagaggttgcattgagctgagattgtgccattgcactccagcctgggcaacaagagtgaaactcaaaaaaaaaaaaaaaaaaaaagaaagaaagcaagcaagaaagaaagaaggaaggaaggaaagaaagagagagaaagaaagaaaagtaaatctgtggatattgtacaaaagattgttttatgattttttaattttttaacataacttttattgacttgtatttgtatttttatcaaacatacttcatttgtttatttatttattttgagatgaaatctcactctgtcacccaggctggagtgcagtggtgggatcttggctcactgcaacccccgccttccaggttcaagcaattctcctgcctcagcctcccacgtaactgggattacaggcatgagctaccatgcccaactaatttttttattattagtagagatggagtttcaccatgttggccaggctggtctcaaactcctgacctcaggtgctccacctgcctcagcctcccaaagtgttagtattataggcatgagccaccgcacccagcctcaaacatactttagacaatttttcacctcagcactattgacattttaggctatgtaattctttgttatgggggctctctctgccttgtaggatgtttagtaatatccctggcctctacatattagatgtcaggaagacccctcagttataacaatgacaaatatattcagattgccaaatgtcccctgtggagcaaattcatcccttgttgtgaactgtgatccagagagccaaatagtgatacaaggtttattgttcacaatagctcgtcccctccaatccagacatctgcctcaccatattccactccccagaggcaaccactttcaacaatcttaaatgtttcatttttattctatttaaagcctttgctcatttttaaattgggttttgtccacattattgagtggtaagagttctttatatactccacagccagttgtggtagtataggcctatggtcccagctactcagaaggctgaggcaggaggataacttgagcccagaaggtcaacactagtctaggcaacatagcatgaccctgtctctaaatgagtctttgaagtatatatattctaggtaattgacctttatcatgtatataatttgtaaatatttcctctcaatctattagttgtcattgcgctttcttgatagtctcctttttaatcttgagaaagcataatttatttttcctctggttggtgtgctttaggttgtatgtaagaaaccattgcctaatccatagtcatgcagatacatccctatctttttttttttttttttttgagatggtctcgctctgtcgtccagattggagtgcagtggtgtgatctcatggctcattgataactgcagcctctacctcctaggctcaagcaatcctcccccttcagcctcccaagtagctgggactatagcaccagctatagtcagcctcccaggtagctgggaatatggcaccaggactatagcacataccaccactaagcacagctaatttctgtattttttggagagacaaggtctcaccatgttgcccaggccagtcttgaactcccaggctcaaacaatcctcccacctcagcctcccaaagtgcaggattacaggtgtgagccactgtgcctggcctagagagatttttttaagaaatagtgaccaaaaatatcccacatttgatgggaattgtgaatctacacattgaagatgctcaacaaattcaaagcaggataaactcaaagagatccacactgacacacattataatcaaattgtagaaagctaaagacagaaaagcagcaagagataagtgattcatcctgtacaagggatcttcagtaagactaacagttgcttatcagaaatcacggagtatagaaggcagtggtggtgtgctgggcatggtggcatgtacctgtagtcccagctgactgaggctgagacaggagaattgcttgagcctgggaggtggaagttgcagtgagctgagatggcgccattgcactccagcctgggcgacagagcaagactccatctcaaaaaaaaaaaaaaaaaaacagggttggggaagctcagcatggtggctcatgcctgtaacttcagcacttttggagactgaagtgggatcacctgaggccaggagtccacaaccagcctgggcgacataaggagaccccatctctacaaaataaaaataattagccagacaaggtggctctggcctgtggtcctagctactcaggaggctgagacaggaggattgcttgcagccagcagtttaagactagcctggacaacatagtgagaccccgtctctacaaaatataaattaaaaaaattagctgggcatggtggtgtgcatctgtagttccaactactcatgaggctgagacaggaggatcgtttgagaccagaagttggaggttacggtgaggtatgatcataccactgcactccagcctggttgacagagcaagaacctgtcactaaaaaaataataaatgaataaaaatataagaatgcttggcctggtctgggcgtggtggctcacgcctgtaatcccagcactttgggaggccgaggcgggtggatcacctgaggtcgggagtttgagaccagcctggccaacatggagaaaccctgtctctactaaaaaaatacaaaattagccaggcatggtggcacatgcctgtaatcccagctactcgggaggctgaggcaggagaattgcttgaacctgggaggcagaggttgcagtaagccgaggtcacacccgattgcactccagcctgggcaaaaagagggaaactccacctcaaaaaaaaaaaaaaagaaaaagaatgcttggctgggcacagtggctcatgcctgtaatccctgcactttgggagtccgaggcaggtggatcacctgaggtcaggagttcgagaccagcctggccaatatggtgaaaccccatctctactaaaaatacaaaaatttgctgtgtgtgatggcacgtgcctgtaatcccagctacttgggaggctcaggcaggagaatcacttgaacccagaaggcagagtttgcagtgagcagagattgcgccactgcactgcagcctgggcaacagagcaagactcgggctaaaaaaaaaagctgaagtgagtccttcaggctaaaatgaaaagatacaagataataactcagagctatatgaaaaaataaaaatcactggtaaaggcaactatatagctaaatataaaagctagtattattgtattttgggtatgttattcctctttctcctttatgatttaaaaacatgcatgaaataatatgcatctatgttaataggaactaattgtttaaagacataatttgtaacaatatagctaggggacagagaaaggagcagagttaatgtatgctattgaagctgagttggtatcagtctgaactagacttagaactcagcatgttaactgaaatcttcatagtatccactaaaaacaaaactttaaaaatatacagaaaaggaactaagaaaggatcaaaatattacaggataaatcattaaccaaacacaaaagaaggtactgaggagcaaaacactttatgtagaaactaaacagcaggatgacataagtaagttctttggtgtgtgggtttttctgtttttcttttttggggtttctttgagacagagtcttgctctgtaactcaggctggagtgcagtgtttcattctcagctcactgcagcctttgcctcccaggttcaagtgattctcagcctcctgagtagctgggattgcaggcgcccaccaccagacccagctaattttttgtatttttagtagagatgaggtttcactacattggccaggctagtctcgagctcctggcctctagtgatccacccgcctcggcctcccaaagtgctgggtacagccatgagccactgcatccagcctgtttttggttttttttgagacagggtctggctctgttgcccaggctggagtgcagtggcacaatcacggctcactacaaccttgacctccgcaggctcagctgatcctcccacctcagcctcctgagtagctggaactacaggtgtgcaccaccatgcccagcttatttttctattttttgtagagacaggagtcttgctatgtcgcccagcctggtctcaaactcctgggctcaagcaatctgcccacctcagcatcccaaagtgataggattacaggcgtgagtccaaccataagtaagtttctgttttttgtttttgagtcaatctcactctgtcccccaggctgaagagcagtggtgcgatcatggctcactgcagcctcacctccaggcgggagccaccgtgcccggtcaagtaacttttctgtttcagtaatcactttcaatgtaaataatctcatcaatggaaagatcggcagaatcaatttttttaataatgtaatacataatccaaatatgcaactcacaaaatactcactgtagacccaaagacacaaatttgttgaaactgaaaagatggaaagagataatccatgcaaatagtaaccaaaagagagccagggtggctatactaataataccacacaaaatagattttaagccaaaaactgttacagaaaaacattttatgttcgtaagagagtcaaatcacaagaagatgtaacaattataaacacatatgaaccaaaaaaaaaaagggctccaaaatgcacaaagcaaactaataaaattgaaggaagaaacaattttacaatgatggagacctcaatgcagtggctctatcacagctcaccgcaatctctgcctcccagactcaagcaattctccagcctcagcctccccagtagctggaactataggcacacagcaccacacccagccaatttgtgtatttttttgtggagacggggtctcaccatattgcccaggctggtctcaaatgcccaagctcaagcaattcacccacctcagcctcccaaagtgctgggattacaggcctgacctactgcgcccagtcaacaccccaccttcaacagtaaatagaacatctagacaaaatcaataaggaactagaggaattgaacaacacactaaaccaactagacctaacagacatatagaaagctctccatctaacaagtgcagaatatatattcctctcaagtgcatatggaacattccccatgataaatcatatgttaggtcacaaaacaattctcaatacattttaaaaggtcaaaattatatgaagggccacatgtgttggctcacagctgtaatcccagcacttagtgaggctgagacaggcggatcacttgaccccagaagttcaagaccaggctgggcaacatggtaaaaccctgtctctacgaaaaaaaaattttaaaattagctgggtgtagtggtggtgaatacctgtagccccagctactcaggaggctgaggcaggaggatggcttcagcttgggaggcagaggctgcagtgacccgagatcataccactacactccagcctgcaggacagagcaggacctgtctcaaaaaaaaaaacaaaaaaaaaaaaacaaaaacaaaacaaacaaaaaaaaacaggccaggcttggtggctcatgcctgtaatcccagcattttaggaggccgacgcaggtggatgacctgtggtcaggagctcaagaccagcctgaccaacatggcaaaaccccatctctactaaaaatacaaaaaattagctggaaggggaggcaggcacctgtaaccccagctacttgggaggctgagccaggataatctcttgaatctgggagacagaggtttcagtgaggcgagatcacgccactgcactcaaccttgagcaacagagtgaggctctgtctcaaaacaaacaaacaaaaaaattatacaaaaaaaaaaagtgaactgcatgttgctgcacagtctaccatagcacaaatgtcaattgcttcttggctttcctggggtgatgggaggtctgaacctaacacagtctcacctgatccttcacaggagtcacgtagcctttctctctccagtccacagatgtggggatctcaagaagcaggcgttcctggaactgtttccccttcctgtgcttctggtattgaaaaccattcatcacctgcctgaattcttcagtggtcttcaaagaaaagtaaataaaatgttaagaagcaagagattaatttggtaaagaactgaggaggggaagcacagagctgggcagcccacagcatacttaccatgtctccaaaggcgttcatggccattgtgaagctgtgtttcccttggctgtattcctgattgtgctgctcagtcatcttcatgttctctcacactgctctcctccatccttcttcattctaaaggcaaacatgtaactgatgttcttcatttctttttttttttgagacggagtctcgctctgtcacccaggctggagtgcagtggcacgatctcagctcactgcaagctctgcctcctgggttcatgccattctcctgccccagtctcccgagtagctggaactacaggcgcctgccaccatgctaactttttgtatttttttttagtagagacggggtttcaccgtgttagccaggatggtctcaatctcctgactttgtgatccgcctgcctcggcctcccaaagtgctggtattacaggcgtgagccaccgtgccctgccgatgctatttatttctaattaaaacccaacatgtgctaaccaagtgaatcttcagacagagatgtaagagtaaccatggccagggaaggcttgacacttctaggagatgttttccaagctgagacacaacaagggtgtatgcccatatcgtgctcataatcagtgctattaagttattgcgttagcttattggtaggagccagcctctagaagccactctctggccatatgatcccaatagcaatgcccatctctctggggttcccctggacagtttcagatgccaccaaccatgtcatataatctcttgtgctttgccttccacttggtccattgtgcgtctaaactgtggtcacgtgttagagcagctgaggcaattcccaggcaaaaggcagccaggaggagtgaaggattcatgtttcaaaaatctaggaagggaaaagaaatgaggatctgattagaccgatcctaaaaagccattttactaccccctgagaaactagggccaccatggtagaataaaaatatttaaattattcttccaagcatttacctaaggactgtggaagaggccaaggatgtggctggagaaaaacagggcaagtggaggtattggagggacccaccaaaatgaaaagcagcctgtccagagctgtaggagttgaaacagttttctgggatgatgatgacaggctatgaaaaggacaggaaggtacctgatgggcgagaagcttaaggcaacaaccgggaaactaggaaaccgttggcccaggttttgtaccaattgtgctgaggtcatccaggcaaaacctcaagaatgaagacatctaatttcaagaagggacaaagggatccccaataattgggaagtcacatcacaccttgttcttggctaatacacaacagaaggtgaagtatgttttccaaatgccccttgtaatgaaacagttattgaatgtcttcccaggacaaactgggaaggagagcacccatctaccgccgttcccgcagtcctgcagtcctgcaggtgggccagtcctgccaacactccagctcccctcacagagcataaactgaatcaggtggccgaaccaccggaagccagagtccccagtgtccgcgcccacacaggggtgggtaggcagcttcccaggctttgggctggggacccaggccaggtctcctggctcttgctcccgccctccgctcatgctcactgtggccccaggacgtgggcgatgttgcagggagcaaggggcgcctctgcctgatttgccggggtcgagcctccctgtcccacccccaccggccctgggaatactgcggcctggcactccggaaaatccctcactcacagagctgaaggacttgctgggtccctggtggcccctgtccaatcttagcccactggggtctcagctgctgtagccacaggtggacaggcacagtgggcaggtgctgggtccaggagtctcctgtcgcctaaggccgcccgaaagcagctaattgacctctaaagcccctagacgcccctgcccccttgccgcccaggcaggcccgcccccaccacttgcccgctctgcgattggctgcgccagccgctgggcggggccttccggcgtgctgactcctggcatgtggagcagctcagtccccttgcctcagtggaaccgggggaggggagctgggggctacgaagagaagggtcggaggtctccctggagggttcggatcaactaagtaccctatttaatgccctgggcgggtggtttatgaaaagaaatttacaggagccctgtgtgcattttcagtttaaccctgcttttcccttaggcctagaatttttgattaaaatctcctgcagggcagagagccagaggactctaatccagtggttcctgtttagtccacagcaaaggtgcggctggctggaagaacgcacagcctgcaagcagaagccttacctcccaattaagggtgtagaagaatctgggcgtgttgctggtggctcatgcctgtaatcccagcactttgggaggctgaggcaggcagatcccttgagcccagtagttcgagaacagcgtgggcaccctggcgaaaccccttctctactaaaaatacaaaaattagccgagtgtggtggcccgcgcctgtggtcccagctagtcgggaggctgaggcaccagcatcgcccagcccggaaggttgaggctatagtgagccgagatcgcaccactgcactccagcctgggcgaaaggagaccctgtctcaaagacaaaaaaacaactggtaggaaaacgcaccctcaaaacacatgatgagatggtcgagaccagaccctaggagggtgggtactggctgggtgggtatccagagaccatgggcgtttcataatgcattgtttcccatctcctccactcagcgactcttcttcccctgaagtcttgcattaagtaagtgaatgaatcaatcatcaagttaatgaagctctgactttgtacttgttgtcctttgcttggtacagttgggcactgccttagaaacaatctccaggtaattttcccaactgcttttgtgaggcccagttttccattttaaaatctaagattacctcagtaatcttgcttttacagcaaatgggcatggagcctgacagatatatttaaactaagttatggacaagctgcctggtgcattaggtagcataggagctaaccttgtgggacatctccccatattcgtaatattcacccctacatctataatcaataaatgcttgtttggaggccatagaaactcttcctgagatctgacctgtgtcttctgctatctgcctgatttctccccatagaacaggaaaacactgtgtaggagatattgtgaatagaaatatgaatataggccgggagtggtggctcacacctgtaatcccagcactttgggaggccaaggcgggtggatcacctgaggtcaggagtttgagaccagcctggccaacatggcgaaaccccgtctctactaaaaatacaaaaattagccacgcatggtggcaggcacctgtaatgctagctactcaggaggctgaggtaggagaattgcttgaacccagggaggcagaagttgcagtgagtgagatggcaccactgcactccagcctgggcaacagagtgagactctgtctcaaaaaaaaaaaaaaaataaattacaaaaattagccaggcatggtggtgggcgcctgtaatcccagctactcaggagcctgaggcagggacaacggctcaaacctgggaggcagaggttgcagtgaaccgagattgcaccactgcactccagcctgagagacatagcgagactccatctcaaaaaaaaaaaaaaaaagaatataaataggaaatacagtgattcaaataagcaattgttagttcctcagatcagaactgtgagttctatactagactcttacatgttatttcttctggtatcttagcaatgattctgaataaagatcagactccttagtcggcaggtgggacagttctcaataacagaagctgggttctcaggggatcccgtggatatgaggatgaaggttagaagcacttgggaccatacctgcaggtctgatttgaggacaatgagaccaagacaggaaggcagcacctgctgaggggctgggggtgggagaagggaggaaacgggacacaagaaaataagtataaaccaccagactgcagtcagtgatcaacaaaattcccaagtttatattgagaagatttccctggtttggggttttgaagagattatataagggattcgggttgcttgatttttttcattctttttcttttaacttggtctcaatttttttgtaaaaaaaaaaaaaaagaatgtcttatgtgcgcctttagaactggtgaatgaatgaacctccctttttaaataactgagattgtcactgaagcactgtcatccgatttaggcttaaaaatctgacactgaatttatcctagatgataaagtgcaagtctcttgtctcctagaaatgatcaggcaaggaaacacccaggaggcccagggcaaaatgccctcctggaagctggtggggtaggaagatgctgaggcccagtatggtccctggagcatgcattctgtgtggtgacagaaattgtttgcttgaccgtacattggtcaggcttctgaaccttctgctaaacccatctgtgcactttttgtaaaattcagttttaggaaattaccctgctaagtcagtttagctggcaggaatccccgtccaccatatactgatcagggtcctcatcccccaccatcccgcagctgatgtcagataaccttggcctgtgctcagcgagaatctcgttaggtcagtttagccagaatcctcccttacccttcatgttccctcatagtcatttcctatctgctaacccccatcctcctccttgagtataattaccacttccttgtgctggattcagagttgagcacaattgctctctctcactgtaagaactacttgcagtgctcctagacctacatatgtgaacctgtttctttaacagtgactcacctgtctttttctcctttcaacttgacactagctgaggcttatccgcatcaaagtggagggactggccccgggggatcctcagggcttcaccttgatggcctgcaggctcacattccactttttctggtgccttctggctccgagtccagtttgccacacaagtgatggaggttggaaggagggatgaggtgacagaggtgaaggagggtaaattcttttctaagccctacttgcctgacatgcatttaggtttttagaaaggaacctgaccccaccctttattttctatctcccacttccatgactagccttacctgtaaaaatggggcatagaagagcccccatctcctagggcagtgtttttgagcagggggtcactgaacagtagcaccttcatctcttgggaccttgttaggaaattctggacttggggtggttgatcatgcctgtaattccagcactttgggaggccgaggctggcagaacacgaggtcaagagatcaagaccatcctggtcaacatggtgaaatcccgtctctactaaaaatacaaaaattagctgggcacggtggtgtgtgcctgtagtcccagctaatggggggctgaggcaggggaatcacttgaacctgggaggcagaggttgcagtgaaccaagatcatgccattgcactccaacctgggtgacagaggaagactctgtctcaaaaaaaaaaaataaataaaaattcctggaaatggattagcttgctgacaagagttattccattgtgtgtttctacctgcaatacctgaggatgcccattttctcacgatttataaactaactcattttatagatgtaattttcatacatttgggggtatcgttctaacttcattattattacttcaaggtgttattatttccccatcatcatcatggtcattatcataactagttggtgctgacagtagtcaccctgcattgagaactcatgctccaggccctttccacatagacttgatttaattccattcactcctcacaacaatcgtctgaaagaaagaatcactaagccattgtataattgaaacacaagaggcgagtgacttgtgtgcccttgggcaggtaatttaaacactctgtgcccccaagttccaatagataaatgtaaataataatatctttcttacctaatacatggggtcaacagttaaagtactgtacatttgtgaggtatttcatggcacctgtgaattgctcatgtgatgacttagtgtgcttccagtgtcagtgtgctgggaaggagacagaataagaagaagactgaaaagatgccgagtctagtgcagggtatcctggggaaaacacctcctgtttgtccaacagcgattggccacacattgaagacacactacctggctgtgaactggggtgaccctgttgaaatcttgtggaaagcttgagatgctccttagagggtgtttatccctcgagctggcacaaatgcggtttgttgttcagtttttccttctactctgcctctatctggtacaaaatggaattgaagaggatataaaccagcaaggaacaatctgaaatcagaatggtgacaatgggagaaagtaatcttggttcaacccaatgttcacctgaagtctctttattaaagactactaacaggaacgaaattgcataataatcttcctatgataatttcaagttccagaatttctctatggaactttcaaatttcacctctgttaactcatggaattttccctagaatctgcaaattaccgaagtctttggaggtttgatgatcactcactggtcagcggtactacaaaaggattctggggagtttgactcagtggtcagcaaaggctcttccgaatcttcagtctgattctgagattccccggggagaactggagcctttcttaacagctgttgattggaaagaccacctgcttcatcctctattgcaacagaaatagccattgtgaatctccatggggaggcacaatgagttttttctagcatgtgtgactcaggtcattttgttccgtggtttccagttgtggggacttggcaaggtcacaccctcccctgagcctcagtttcatcgctcagaaaatgaggataacaattctacttgcctcataggattgttgtgaagattaaatgagacatgtaaacatttgcttatagtaatttcacaccactttattgtggaatcaaagacagaattcttacagaggtcttggttagttaagaaaacatccattcaaagatttgattcacaggacaccctcactgtctttctctcttttttttttttttttttttttttttttgagacagggtctcacttcattgcccaggctggaatgcagtggtgtgatctcagctcactgcaacctctgcctcccaggctcaagagattctcccacctcagcctccgagtagctgggattacagccatgcactgccactcctgggtaatttttgtatattttgtagagacggggttttgtcatggtgcccaggttggtcttgaactcctgggttcaagcaatccacccgcctcagccacccaaagtactgggattacaggcgtgagtcaccacacctggcccttgcttactttcgtacttcccaagaggcaggttaccaaattggtgaaattaaccataacatcattgtgatgggcaagcagatatattaaaagcaaagatacagcaggttaacattaaattttgctcatcccaggacaaacctggccacaggaggcctttgccagtattctgaaaagtgttgtgaccatctcctttaaagctcagttaaaggtttctggctggactccaggctgcttcaagctctttacttgtctttatcattctttaaggagggacccagacacagtatgcagaggcctgaatcctctagatcattctctctccaccatgagtcctgccgtggggacttttccagctccctttggccttatgagccagaaaatcaggctagagcctaaagagaacagaaatttcagaatcaggcttgttctgcgactgtatgggggagctgaaggacacaatgggctttctatattggagactacccatcatactctctctgcccagggagaaaggacagatgctgtgtgattttgcagtctgtgatttggcttctcattctcgctgctctctacacctcattgtttacttcactcccctgaaaaaaatgctccctaacaggctcagtacccaacttctgggtattgctgcccacatttgccttggttctaccttttcagattgcaggatcctgaggttttgcttggagcagctcagattctccactagatctaagatctcacctagtcctgaggatttccttaaagggaaggggaaagatagatagatagatagatagatagatagatagatagatagatagatagatagatagatagttgctgcctttgctctacagcatctgcttggtgaagaggctcaggatctggatcctggcctctcagctctcaggaaccccattcccccctgacaggggtggcaagttcatcctattattcattaagaaatttgaaaacaatcattcaggaattttaggtcaagagctggaaaaccccaagcctccatcacctgagcaaagggagatactgtgagcacctgcaggatacacccatgttccaccacctgcctgaagaagcctgtggttcttgtcagcttctcaagggtgaagtgcagatccttttctgcttgagcagaagagcagaccaaagagctcattgactcaaggagcatcacggcaactgagctgcacctggaagagaagaatccagggtgtgatccacagccaaggcctgaagcaatggggcccatacttggcctctccagggtgagttgtgacccaagtgctgggctttagcccatgagtggtccctcttgccatttccagtttcctcccaaagagaggccagtgttggtgatttcatttcttataatctccttaggagcacaggttttggtttgtgccttttttggatcaggttccctgcattgcagctgctataattaaaactattaacaacaacacagcaccacagaagcaagttagttgctaatggaatttgctgataatgctgtcttctagagaccactctagtaactggagagccttggtgtagagctgatgataaaacctattcctgcttttgtcagtcatgaggagcatttcctttctagacagaggaactgaaacccacatgccagcccaaatttaccaaaagcagtcactggaatactcatcacaccatcatgtctcatcttatccctttcgttaccttcaaatacggccccgtttcctcaggaccagaactcccttatgtgggcagcaggactaaggcccttgagttacctgtggtgactcctcattaaatggaggaatgtgccagtattttcagcaaaacatgaatctgatgaaacactgactgaactgtctcctagtttcaaaacaaattattaccactcagggcctctatttagggcaatcagagtcagaagtgggaacgcatcttgtcctcctaccttgattaacagtaactctaattgcaggatgatggtcaaatcctctctcctctaatgtgcagttgtgaaggatttaggctccactgctcatgcatttgggtggggcctgaatcactttcagtctagcacaggcgggtcacttcaggccttcccacctccatcagcatccttcaatcctcccctgacatctctcatttatgcttcctattgattcagaggtcccaacccgagtggctaaaagaaacattcattaacctttctacaaagtcatgaataatccatggattacattgaattcatccctactaaaaccatcttcagaaattcagatgtagtaaccttctttctgaatttttttttttttttttttttgagatggagtcttgctctgtcgcccaggctggagtgcagtggcatgatctcagctcactgcaagctccacctcccgggttcacgacattctcctgcctcagcctcccaagtagctgggactacaggcacccgccaccatgcccggctaattttttgtattttgtttagtagagacggggtttcactgtgttagccaggatgatctcgatctcctgacctcatgatccgcccacctcggcctcccaaagtgctgggattacaggcataagctaccgtgcccagccaagtattctatccttaatgaacacatatatgcacattatatctattttttataatatatatatttagaattgaatgtcagagtacatatcagtgttggaggaagagaataaggaggaagcacagaaagtaaaaaggaaaaataggcaccaaaaaagatttggagaatggcagatggccaaggagatgcagttgggaagtgcctcttccatggagaggaacccaaatatctagtaaaccttcacattttaaacagatcttttgagagaaaacactgaaagttgacacagaggtgacacagacaccatggttgaagagggaagaaatgggacagtctgctcagagtcactagacatcaggactggcccatataccctgaacaaacccaaggaaggggtgagtgaaggaaccctgggacactacatacccataatgtacctctgagatcctagttacaggagtttctacgaccctcatagatctttggactggtaggagagctgcctcgagcacatgcagaggcacagtttgaacccacacagagcccagaaggctttgttgtgctgtgcagctgcagcaaaatgcaaccctaggtgcccatccctcaagcctccatttcatactgagtggctaagttcctgctgtccgccaggctgggagtgaaccacgcctggcctgctcacatgcccaagataggccccatcaccagtgctgtgtgattaagttgcatctggtccacatgcccccttgcctgtcaaccccttcccagagctcatgcctggtcacgcctgcaagagggtgtccacagcacagcatccactgcatagcttgagtgttttgttgacagcctgggaaaagctcaccaccctgtccccaagtcacagccagtgcttgaagcttagaggccagaggacaaatccgtgagcccagtcccaactccccaagactcaagtataccacccagggacactgagctgagatttgtaacctaatctcaagtgaaggaggatcctccatagtcagaatgcagagaagggtgtggtatgggttctcatgggggcatgggaactggacacccctccctttgcaagaccagaccatgaagggtatggcctgatggtggtagcttctttcccagggagtgtcctggcacagaatgcctggagcagctcaacaatgtgggagcagatggcttggggaaagcctagttggttgggcttgccgccagggcgagtgtctgtgggagatctgctgggtcaggggagtgtaagctaggcagactccatggttgcctgctgggctgaaaatcatgggctgcagactccatactggtgttgcacccattgtgccactgccctgcctggagatcctctacccttgaaatactgcatcatcagagcaactgcagacataccctaaaacctgctctgactttggtaagcacagtggactggtgggtctctggagagttgtgtgtccctagagatgtaatcctcagtgtggaccatccctaagggaagggggagtgcagcctgccaaagcacaacatgagacaaagaaaatgcggccatggcataagccactgaaaggagcaccaccaaggcccagaaccagacttggagaaggaattatgtctcgcctccatctcccctccccagtgcactgttgcagatgcaacaatagctcttcccataggggcccagaaagcgtgcactgaaagaagttgtttctcatgattctccagtgagggcaagcatgcaccaagaccccacctgccagctcttactcttaagtccatctaccagactgaagtttgagttataccatcatataaaaatacattgctaaaacaagcaacatctgtgaaagccactgcagcaacctatctgtaaccaaggaacatatatggaaacttcaccctctgcaactacagagaaatgaagccaatcaatcacatacaccactgtcatactttcaaagagaataaaaaatataaaagccctgtgatggttaatactgagtgtcaacttgattgtattaaagggtgcaaaatattgttcccgggtgtgtttggagggtgttgccaaaggagattaacatttgagtctggactaggagaggcagaaccaccctcaatctgggtgggcaccatctaatcagctgccagcacggctaggacaaagcaggcaggagaaggcagaagagcagacttgctgagtctcctggctttcatctttatcctgtgctggatgcttccagttcttcagcttttggactcttggacttacaccagtggtttgccaggggctctcaggccttcagccacagactgaaggctgcactgtcagcttccctacttttgaggttttgggactcggactggcttccctgctcctcagcttgcagatggtttattgtgggactttaccttgtgatcgtgtgagtcaatgatccttaataaactccccttcaaatgtacatctatcctattacttcggtacctatagagaactctgactaatacaaaccccatctaaatgaagcaaattcaaaaaagaagtgtcaactcccgcagatggaaaggaataagcacaagaagtctggcaatacacaaagccagagtgttttgtgatctccaaagcctctcactagctccctaggaaaggatcctgaccagatgtaaatgtctgaaatgagacacatagaactcagaagatggatgtcaatgaaagtcaatgagacataagacaaaatagaaatccaatgcaaagaaaccagaaaaacagtccaagatttgaaagacaacatagttatattaagaaagagccaaactgaacttctggaactgaaaaattcactaaataaatttcaaaatatagttgggagacttaaaaacagactaggccaagcagaaggaaacacttcaaagcttgaagactgattcttcaaattaacccagtcatgcaaaaataaagaaaaaatattttttaaaaagacaaagccttcaagaaatatgggattatgtaaagaaaccacttctacaacttattggtattcctgagagaaaagaaagagtaaccaacttggaaaacatatctgaggaaaaaattcaagaaaatattctcaattttgctagagatgttgacatgcatacaccagaaatccagagaacctctgttatacactataaagacagccatccccaagacacatagtcgttagactatccaaggttaacacaaaagaaaaaacaaatctcagacacagctagagaaaagagcaacactacctacaaagggaacccatcagactaacagtggacttctcagaagaaaccttacaatccagcagagattagaggtctatttttagtactctaaaaggaatgacattccagcataaacattcatattcttcaaaactaagcttcataaacgaaggagaaattgagtctttctgagtcaagcaatcggtaagggaatttatcaccactagactagccctgcagaaatgcttaagggagttctaaatgtggacatgaaagaacaatacacagaaaaagcacagttaagtacatagtccacagactctataaagcaactacacaattgagactgcaaagaaactagctaacaaaactatgacaggaacacaatctcacatatcaatgttaaccttgaacataaatggcctaaatcctccgcttaaaagacatacagtggcgaattggaataaaaaaatcagaatcacccatctgctgtcttcaagagacccatctcacaactaatgacactcatgggttcaaagtaaagggatagagaaagattaatcatgcaaatggaaaacataaaagagcaggagtttctattctcatatcagagaaaacagatcttcagccaaaaacagaaacaaggacaaaattgttattgcttaatgacaaagggctcaattcaataagaataattaactatcttaaataaatatgcacccaatattaattggagcatcacgatacataaagaaatcactactagacctaagaggtagacagcccctcagtaataactgggaacttcaacactccactgacagtggtagatagattattgaggcagaaatctaaacaaataaattctggacttaaatttgccacttgaccaattgaacctaatagacatctacagaatactctacccaacaaccacaatatatatatttttttctcatcttcacatggaacatactctaagagtgatcacatatgcagttataaagcaagtgtcaagaaataaaaacaatcaaataatatcaagcatcttcttggaccgcagtagaataaaaataaaaatcaatagcaagaggaactctaaaacacagacactcacacacaaacacacacggaaactaaagaaattactcttgaatgacttttgtttgggtaaacaataaaattaaagcagaaatcaaagaattttttaaacaaatgaaaatagagacacaatgaacaaaaacctctgggatgcaataatagcagtttaaaaaggaaagattatagtgctaaatacctacatcaaaaagatagaaatatctcaaattaacaatctaacattgcacccagagcaagtagtaaaacaagaaaaaaaactacatccaaatatagcataagaaaagaaataacaaaaataagaacaggactgaataaaatcgagactcaaaaatccacacaaaggatcaacaaaatgaaaagttggttctttgaaagtgtaaccaaaattgatagactgcaagcaagattaacaaaaaagaaaagatccaaataagcacaatcagcaataacaaaggcgacattcaatcgagtcccacggagattcaaaagattctcagagactactatgaacatttctatgtgcacaactagataacctagaagaaatgaatacgttcctggaaacacacaacttcccaagattgaaccaggaagaacctgaaacactgaacagaccaacaatgaattacagaatgaattgaataagtaatagaagcctaggactagatgaattcatagctgaattctaccagacatacaaaggggagctcatgccaatcctactgaaactattccaaaaaatcgaggatgagagattctcctctaacttactctacaaaacctatatcatcctgataccaaaatatggcaaatactcacacaaaaaacaaaaccctaggccaatatatctgatgaacatagatgaaaaaatcctcaacaaagtacttgcaaaccacattcagcagcacatcaaaaagataatacaatatcaagtgaactttatacctgggatgtaagagttgttcaaatatatgcaaatcagttaatgtgattcaccacataaacagaatttaaaatgaaaaaaaacataagattatctcaacagatgcaggtaaaacatttgataaaatccaacatgccttcataattaaaaccctcaatagactaggcattcaaagaacatacctaaaataataagaaccatctattgacaaacctagtctacgttatactaaacaggcaaaagttggaagaattcccataagaataagaacaagacaagaatatccactttcaccactcttattcaacttaatactggaagccctagccagaatgatcagacaaaagcaagaaacaaaaggcatccaaataggaaaagaggaaattaaattttatttcttcactgatgataggattctatacctagaaaaccctaatgattctgaccaaagactcctagagttgattaaaaatttcagtaaagttttaagataagaaatcaatatacaaaaagcagtagtatttctatacaatgcaatattcaaactgagaaccaaatcaagaacacaatcccatttacaagagccacaggaaaaaaaaaaaaaaagaaatacttaggaatacctctatccaaggaggtaaaagatctctttaagtagaactacaaaacactgctgaatgaaatcatagatgacacaaacaaatggaaaaatattacatgcttatggattggaagaatcaacatcattaaaatgtctttactgcccaaagcaatctacaaattcaatgcagttcctatcaaactgccaaagttatttttacacagaattagaaaatcaattctaaaatttgtatttaactaaaaaagagcctgaatagccaaagcaatcttaagctaaaagaacaaaggcaggggcaacacattacctgacttcaaactatactacaaggctacaataaccaaaatagcatggtttgggtacaaaaacagacacatagaccaatggaacaaaatagagaatccagaaatgaagtcccatacctacaaccaactgatctttaacaaaattgataaaaatacaatggggcaaggataccctattcaattaatggtgctgggaaaactggctaaccatattcagaagaatgaaattagactcctgtctctcaccatataaaaaaattaactcaagattgattaaagacttaaatgtaaaactttagactataagaagcctagaattagacctaagaagctcttttggatattggcctatgcaaagaatttatgactaagtactaaaacacaaaagcaacaaaaacaaaagttgacaagtgagaccaaattaaactaaagagcttctgcacacttgcatgttatattgcaaatatgaaatagcaaagacatggaatcaacattggtttccaacaatggtggattggataaagaaactatgatgcatatacaccatggaatactatgtagccagaagaaagaatgaaatcctttcctttgcagtaacatagatgtgcctggatgccatcatcctaaatgaattaagatgtaaacagaaaaccaaatactgcatgtcctcacttataggtgagagctaaactttgggtacacaggagcaaaaggatggaaataacagacactggggactccaaaacaggggaaggaaggaaggcaaggtttgaaaagctacttattgggtactatgtttactattcagataatatgttcaatagaagcccaaacctcagcatcatgcaatatattcatgtaacaaatgtacacatgcatgcttaatctaaaataaatattaaataatcaaataaaatgatttccatgaataaaacggtagatatgattatgtggaaaatgctttactatttattatgtggtgaataatttaataatatttaataaatacatgaatgaaaaatagctacaactgtgtgttaggatttcaataattttttatttcattcctataacttttatgtattattatatacataataatatatagttaataataacaaaaacaacatggtattgaaataatttccacccagaaggaggatcaacatatttaagtgactacactactcgagataaaaatcatttatcaaacagatcaaagtcatttacctgctttcctttttataggtcctaggaacacacgtgccatagacaataaaacatcacttcccccatcccactaccttggactttatttaacatctttgggtagaacagaaactgttgataaggtgagttttgttttatagacaagagaggaaaatggatactttttgtggtctgggccttagaaacagactaagatcttttttttttcttttttgctttttttactagcataaaatattaattggcaaaacaccgaatacaagcttcactatcataaaatcaaaacatttaagcaatattccaaaaaagatttgacaaaaactagtcaccaagagtacaaaaattacacatcaacacaaagcataaaaaatgtgaactttcaaattaaacagtcaaaaacatgtacctgcgtgatcacctccacaccttgactgccttcgtctgcagcacgctgctggtaaaggctgggtggctgcaccgtcgtcccctaacccaacattgctttcatctgggaaaattcgcttgatagccaattaagccatggaggctattacatttacacggggctacgcacaatctcaggggacgctcaaacagcagttcgttcctcacacgcactgttgggtgcaaagggcacctggagagtgagggagacctgggcgctttcctgcggggccttggccacgcggccgtcgcccgcaccctgtcccttgcctggcaggggacacaatatttgtacagattatggtataatttgaatgattttctaatctacttatcttaatttatatagtttatttaaatgtcaaggcagagaaatacattgatcatgttaaggtcacgtgatgtggtggcgcagtaatgacttcctgaggaaacagaaatcggatgttttgtgatttagctatgtgcactaaacttattttccatgttttgagagcacattaaacattcacgtacaatgtgggaataggctggctcgtaaccaaaacgtccaacccaatgccaccctttgaatcgctgtgaacaccgtcctattgcggttcagagaaaacaagcaaggctgcgaagccccggggttcaggcagctgcagcgcttgggccaaggtagctccgctctctggtctgaagccacgtggccccaccccggggcggcctggcttttttatagtgcttattgctgtgtttggcatgccattcaacccatcgggatgttggatagtgacttgagagcaatccctagatttgccctgtcgggatgttgcatactgagttcggaataagccctgctcaactgaggcactatcactaggaggaggcactgattcccgcctttcaatgctatctattggtgaaagaggagttggatggcatctgggaaattagtatcacttctactttttcttcttttcttttaaaggttaaaaataccttgtattagttaatactgctataaaatatgaatatccaaatctctgtggctcagtaaaatagatttttttttcactcagagaaagttcaggttcacccttagtaacccaggctgacagagactcttccattttctatacatagcttccccaattgcccagagaagagtggaaagatttgataggtgactgtacacaagaataagaacttagtacctagtcactaatttactcgttgaataaacatttatggagcttaacatattaatcactgggcagacgctgggacacaagaaaaatctttaagatatgtcactgcttattaccaataatgttctagtgagtaacaagagttaataacacgactaattatagtattgtaaatataattacagttccaataagacatacacacacacagaacgattttgtctggttgttgaggaaatctttattgatttaagatatcttttgatgaacaggatttttcaataactatcagaaaaagaatgtctatgacttatttttaaaaactattttcttatctgccttgcatatctgacactttcatctcctatcttccttgaatacaatatagaacctgacatttctttcctttcaaagatccttagagcatttcctacatttaatctgaatgtctttctcagtaatttttcccatacaagcaattatggctacattttcttaatataatcatgaaaaggtgagcaaaactgaaaatttaatttggagaatagatacgaaacattcaattaattcaagttgttgttaggctgcatatgttcagctttcagtgaagatgaacaaatgatgataaatgagaaactgaaagaaaacaaaccaataggtgttttttaagaaacaatattattaaagtgcatgtgttttctactgaatgaaagcaacatagaccttttcctcacattggtagttagtaagatgtataaaaacaactttgtaaagaacaattaatacaggttaatgaatcattgtgaaaaggggataacacactttattgtagcaatgatctgcaaggtgttaaatgttaaaaaagatgaagaacaattgagtagttatttgatcacagtgtttattaaattgcttttcctgtatctggcaagctttacagaaatgtcttcaacagaataactgtgttaaaagccaaatgaaatgcattttgaaatatgattcttcacttggtgtgcaggtataatctcaggtgtaattcagacaagagacaaattcaattttaaagttccatttgttacaatttgatgattgtgattaaagaaccataaaaattttatctttgacatttcattttttcctcacaaaagtattctactgcaattttcttagttttctttcctcttaactgtggtgttacctataaatgctggatttctctgttttacgtgcaacaaatctacaatcaactatttctggaacgccacttcattttaacaacaaggacccataaatattttaaaaattcaaaatgttatatataaaatgttaaatgatacacataatacatttctaagtagtaattatgattatgcccataattatacccataatttaaaaatatgttacctgaagtaaattattatacgttttatgttggaagtgttcatttatctttgatctctgttaacacattgtactatgtggtaataatataaactgccttactggatagtgatgtatctttggtttcatattgttactggactaatattccaacactatagatagtgaaatttaacattgaaacaatttgataatgccatcaatgaatccagtttttaagagtgggatccattttctaaaattgagtatatagatacttcatgagatatcttatcatgcatcctaaaccaaaccaacctcttcccctgactgtcttacagtgtattattattattttatccaccacagcaactagtacatttttcagaacctagtagatattcagtcattgtctatggaatacatgaacacattctgaatttggacagtcatcattcttggtgttttaaaacaaacacttcctgaattgcatccactattttctaagaagccctaggaattcattgaaggagggtatgggtaagttgtgggtgaaactgtaaagatgtaggtcctcctcccaaaacttcttcagcgtatcttcattgctgtttgtttgcttgcttgcttgcttattttaaaagagatctagatatagtctaataagaattgtataaatgtgatgttccacaatgattctaacttacatggtgcaaaataataaaatattacattctacctgtttgtagaaaaccatggatactataaaggatctagattttctctctcctttccttctaagatttattcactcagcaaagacttacctggtgactacttagtgctagacactgttttagatacttgggctataacagtgaaaagaacagtaattgaattaatgaaaagttcattttaattagctgtatggtaaaataggaaactaacaaaaataaaatataacatgtcaaatggcaatgactgctctgagaaaaataaaggagaataagaggttctaaattattatatacggccaatattaccaacatattatagaaagaaatgagttcataatgtttatcagagaattccatgaaaatcgctaaatttttctagaaagccaggcactgataagagaataaacaaacagataactgattttaatttgatcttctcttacaggtgcagctatgatctgccattgtatataatataaaattaaaaattgtttatatttcattcacgttagcatataatgttcttacttttttttttttttgagacggagtcttgctctgtcacctaggttgaagcacagtggcacggtctcagctcactacaacctccacttcccgggttcaagtgattctcctgctccagcctcccaagtagctgggactacaggcaggcaccaccaagcctggctaatttttgtattttattagagacggggtttcaccaaattggccaggctggttttgaactcctgacctcagatgatctgcctgtgcctcggactccaatagtgctgggattacaggcgtgagccacagtgcccggccaacgtttttacatttaaatatcagacatctatcatattcctttctccctactacaaacattgtatgcttttcaataggcataagattttgttttcactcaggttggattcaacaggtattatttagcagttcattgcatctatccatttacccaatagaggaagtatacaagatacaaatgaataaagtgtaataattcttatactatttgcccttatgtcatgtaactgctccatgtttgtattccgaaaacctaactgggagggaaaactcagaaaaatagaataaaaagtattatatatctcatacatcctcatttttgaatattctaggggtacagatcagtataaataaaatactctggtaagtgaccaccacatcatctgtttgtcattcttagacccagagtataccattcttttaagaaagaaaacttgctactgtacctgctacccagtaacatatatatcacatatcatatatatatcataacatatatatcatatatcatatatacacatatcatatatctcatatatataacatatttgctactggttaggagtaacactcagaaaattatacttaataatgtagtacaattaggtataaattcacttagtatttttaaattttacgtatattcctatttatatgaatcgtcatttaaaatcacatctactgatcctgatagcattaaaggcataagaggtactgaggatattaatttaattttgtttacagctatgcacagatatttttagttcactgagatttaatccagtagtctattatttgattaattgtacagctatcaaatcattcaggactcccactgtttcaacaacgagagtggaaaaatattttttcatttatgtttatatgcagctatttgtagtctaaattaatatcctagcaattgatggtgaaattaaaattatttctgtcagatgtggtactttgatgacagtggataagcatgggaataaaagaaagttttgaggaagaggggacagtttttgtttacttaatgattattccaaagatgttaagtaaacattctatagaatgcaacatatagtggaatacagcattgaaacaatttaataatgtagtcaatgaatccagtttttagaaatgggatccattttctaaaactgagcatacagatacttcatgagatgctttatcactcatcctaaaccaaaccaactccttcccttgactgtcttgcagtgcatagggcatctctacactctaggaaaggaattatcaatctgtttatatgccacttataaaatcatacttaatgtacgattaggcataaatttacttgcatttttaaattttgtaaaatgttaacggaaagtgttcttgaaaaacatttctgagaattccaaaaaatgaacaaattttaatacataagggacaatatctttctagtgaattgattatcagagtgtaatgtggtatgttctgattatgttacataatattctgattagcagaaaattttgaataagtgaatttagcaaaatgtttagaggtcaagaaaactgttttagactgactatgttttctgacccaaatgtaagaaagaacccaataaaaagaggcagccagataatgctgttgtttgcaaacttaaacagaagcttgcatgtaatttatgactcaaagaaaaataaaaatagaagttatactttatttagaacttaatgacagtgaaaaattgcacataaaaaggaagactgttgaatacagcaaaagctggaattatataagaaatataaacataaacacacaaaataagtgtaaattataatgaagtaaaaatatatcaaagagaaagaaggaagcagtacaataaaaaataaagttgattctttaaaaaccatagttaaatagacaaatttccagccagattgtttaccaagtaaagagaaaaagaaggagatagatcaaaagacacaagatgatgatgaaaagagggtcagcacttataaacatagtagaaatttaagccataatgagcacaagaaagcattatcaacttacttttgaatatataaaatagacacttaaaaaactgaacaaaaatgacttactagttttaaaagaaaaaaaaaacatcaaacatctatccttccaaaagtatagacttcaaaagtatagtcccagaagggtgaacataaaccacactttaagcaagaactctcagttataaccagatgggtgaacataaaccacactttaagcaagaactctcagttataaccagatgggtgaacataaaccacactttaagcaagaactctcagttataaccagatgggtgaacataaaccacactttaagcaagaactctcagttataaccacatgggtgaacataaaccacactttaagcaagaactctcagttataaccagatgggtgaacataaaccacactttaagcaagaactctcagttataaccagatgggtgaacataaaccacactttaagcaagaactctcagttataactgcttgcagttttagaggatcccagccacactcctgaaccagagcttggcactgggtattccctctggaacacccttttatttccttctctaagcaaagacatggaatcaacctaaatgcccatcagtggtctgctggataaagaaaatgtggtatataaacaccatggaatactatgcagacataaaaaaagaacaagatcttgttctttgcagggatgtggatgtagttagagaccattatccttagcaaactaacacaggaacagaagatcaaacactgcatgttctcactcataggtgggagctaaatgatgagaacacacggacacatagagtgggggacaacacacactggggccttttggagggtggagaattggaggagggagaagatacaaaagaataactagtggttactaggcttaatactggggtgatgaaataatctgtacaacaaaccaccatgatacaagtttacctatgtaatgaacctgcacttgtacccctgaacttaaaagttaaaaatgaatgaagcctgtcagaaccacccatttagcagtctaacattttgcctagtattcccaaatccctttgcctagccaacatttttcacagcactttttgtcttcaaactactggcctgaagcaatctggcttagctttctgagtagctggaattgcaggtgtaccagtgtgcccagccacagttttttcaagacctgtttaagacaacaggttagagaaaatcaagataatattttgagggggaagaaggtaaaatcaattaagacagggtgcacagagtacttgaatggtacagataatgtttatcctttgtactaaatggtgtgtatgtgggaattggttatattattttgactgtttgtagtcatattatatacatatgtgtataaataaaaataaaagaaaaaatataagctaaatttatagatatattaattttatttaaatataacaaagatttgccagtattcaaatgtctgcaatgattcttaaaatgcacagaacctgtgtttaggtacagtatcactgttcatccagccttcattcactcgaatctactcttacctaaaatttgtaccgtaagtaaattacattctgtatgacagaaagcaaattacaatattagaacaacattatggaaaattggcataacattgtacaatcatccattactttattatttatcattttgcaaatttttattatattagtaaaaaagtctaactgtacttaatagctaatacatatattatttgatatttttaaagaccattattaaaataataataatttgggggtgagaaggcctattgaaaaatgaccaacgtggaaatcataaataagtttgatgcaacaaatatttgtgagtcttatagttaaaaatgtaaaaattcattataaacaaagctaaaagacaataatatgcattgggaaatatttgcaacatttacttcaaaggtggatgtccttaagagaatttttacaaattaataaacatttaaaaaggtgaggagtggcaatagctatgagagacaatttacaaaaacataaaaaatatgaaaactgtttaatctgtaagtacatcaataaaaattttattattgtagttattttatctattaaattaggaaaggtcaatacaattggtaatcttccaagtaaatataggagagaaggtctttctcatacatttataagaatattattttgttagaatgcaattaaataaacacttggtaaaaatccatatcctttgtccaaacaatttaagttctagacctctagaatccacatgtacatatacatatatacatacatatacacacacacattcacacctatatattaacaactcaaatccaactccaactcttttgtaagtagtattttgtccaacaaataaatttatctcaaattcttcttgacttttctccattatagagccagcaattctacgtgtaactctacctctaattcctttatttgcatttatttctgctttcaaacccttatatgaggcaagtgggattaatttatttcattaccttaactagattcatcgctttactttgtcaaactctgattgatttgctcaactcaatcttatgtgttcaagaacttaatgtggattcctgttccaccttatgaaagtcttttccaaaaacttgctaaattcttgactcaagacattgcagtcagtaatgcatttctctcctcaaatacaatggaactgtgttctaataaatactcttcaacaatgtgcagttatttctccacaactatcaattccccttaaagcagaattttactaaaaatggctttatccttctggggataatcagtaaaatggcaattggtgggtgaattaaaaatatactaaaagcagatggcagaacatgagtgcagatttttactacaaagcttaggaaaagcaaaaggaacttgaatagagaaaatgcagaaaagccctcctttggctattaggacggagagagcagaagtatgtttagagcttcaaagagtctgactctttgcaactgtttatcttaggactttaaggaagtaaaaggtgcaagtgaaacactctggattataaaatagaatctgacacagaggattcaacccagttaatatgcatgttgcttacatggaaatgctgagaaatttttagcaaatagatagaaaatgacagatggtaggtatatagaaaataattgtaggaaaaaatgtaaaatgaagatttatggtattccttttatattttattttgttaatatgttgcccataatgctttatttcaaagaatgcaaaaccaaaaaagtagttccttcctaacttcccctgcagccttgtcttgtggagcttgtattttacttcatgagaaatgccaaggagatgtcatttaagctgaaacctccagcagaattagccacaatatttgggaaaaagatgtttccagaaaaagaaagagctagtataaatgtccttaggcaagaaagagctcacgatgattgaggaacaacaacaaaaaagattatttcactcaagaaaagtgaattgggagtacagatacaaatgatgaggtctgaatatgattcatggggcaggtcacactagggtgtttgggtatggtctaaatgaatgcgcggcatgagttgctttaaggagaggagtgacatgatttgacaagttcttaagagatccctttgattactctggggagaatagaacataaagtagcagaaatgaaagcaaagggagatagtaggaaataattgcacatttataagcaagaaatgatgttggcttggactctggttatagcaacaaataaagaaaaaaggaaatactgagaagagttgattggatttgctgacattctcaacataaatggaagtcagtatttttttctaataaatataatatgcgtaaatatttttaaatatttaattcttttaccactaatggggcacgagtagacttcagggaacatgccagtacagaaccatataaatgtgatcattggtagagataggaattaataggcatttgaatgtctccctcaacctggaataccacaaataaagctctttgcttttcatgttgcattgttatcataccctatagttttctgccattttcagttacttaatattatgttttgcctcaatagattatagtgctttctcttgttgtgttatatttgcagcaattattagtgaagttttaaacttcaatatcacatctaaaacagagcaaaattgttgcatactattttccattaaaacatgagaccactatgacaaaaaaagctaaacgtgtcatgaaatgacttacattggatgaaagtatatgcaatatattaagaaataatctctgactttatagttttttatttgtagtttttactagaacgtgaaatcaatatgtgaaccctggctggagtttgcatctaaatgtaataaaataaaagaaagtttaatattatcattgaagcattaatgtacattagcgagctggactatataaaataaactttattatatttagcatttgatttttatttatgtatattataaaatgaatatagtttatattataataaaaataaaagaagtagtatgttaactaattagtataagatgcctacaaactacatatctgcctaaatttttgacccatgaaacttcaatgatttgtgttaatgttaaggcctacatttatttatatatatatataattaggggaggaattgttaattctttcattttaaaaattttaactttgcagacaaagttgactatacctgtggcagaacactgcaacagctataaataaataaataaataaataaataaataaataaataacttttattttctgtggagctcccagaattatgaattattctgtagattgagatttgccaaggtccttttcttagagttgcaagagcataggagaaagtcaagggaaataataagcagcacttgatttcctttaccacagtggatgggcttctaaaaccaaattacctgactataaatccagatctatcttctgcaggctatgtgattgtggatgttacctcttctgtgcttcaatttcctcatctgtaaaatggaattatagcctaccctattttgtagtatagtgaggataaatagaatgaatgtatgtagttcttagaatagagcatggcacgtgataagtggtcaataaaatattgtttactactagttatgtaacagtcacttcacacataataatgatttaataaaggaataagaagaatgtagagcacagcttctcaacattggcactatgacattttgggtcagacaattatttaatgcagagggggctataggatgcttagcagtgtctctggccagtagtgtacctcctcctctccaagttttgacaatcacaaaggcttctagacattgacaactatcccctgaaaagtaaaattgtccctgcttgagaacacaaatataaagtaaccactcaaagattacattactaattttaattgaatttgaccagcattatgaaataagcataagcttaagtttctacccttgattttgtcattgtcagttagggcagcagagaactccaattctgaaaattctgaacatgtgctaataccctataatataatcaaaactttcatttttgaattgtatttcttaaaaattagaaaatttattaagcagcaacatggaataattaaccacaaaaatgttgaacataaatctcatttgcctaagttctcttttgaagtcctgtttcactatataagtattatgtgttttgtttcacagctagataacagccagttttttctctgagcctaaggttgctcctcaaatttatggtggcttatagctcttctaagtttctataaaacttcagcaacctgcagcaggttgaaatttattgatattgagttattcaccaggtcatattacaaagtcagggactgactcacccaaaccagatgctccccctgccaccagatcactaggagatattgcaatcatttcccctggctactaaattagcaaaaattctcagggagagagaagggcaagatggcacagtttaatacttactattattcttttattctttatcatcattccctttgaatggattaagaatctgacataaatataacttgctaaagaaagggtgttaggtgagagggaagtcatattggtctaagaaaagtcttagagaaatatttgaaaagaggtagagagaagggttggattggagtgggtgggtggggaatcacactaaggagatggatcattcataatttctttagacatggtgaggcagccacaggagtctgaacttgttgaaaccctagtctgaagccaataaaagtgctcaataaggtcacactttgatcttctctgcctaaagcagttattcaccctatctttgggagaggaaacatctacaaacctttgttctctttgttagcagagggatgacatgaatttgggaaaaacgtttgagagacaaaatgagatttagctcgagcaagtgatcgacttgtgctgggttgcaaatggactttttcaacaggcaggttgaaactgtgcttcagcaattaggataccagatataaacatccatgcacagaattggaaaggttcagctttcatggttgctatggtttgaatgttccctccaaaactcatgttgaaacttaatccaaaatatgacaatatagagaacgagctttttaaagaggggattggatcatgaaagttcttccctcatgagtggattaatccattgataagtcagtggattaataggttatcttgggagggaaaccattagatttataagaaggggaagatagacctgagctagcatgttagcatactcagccctcttgccatatgataccctgtgctaccttgggactcttctgagagtccccacaagcaagaaggctctcaaaagatatgccccatcgaccttggatttccaagccttcttagctgtagaaaataaattcagttctttgtaaattactcagttttaggtatactgctataagcaacagaaaatggactaagacaatggtcttatccagaactttgtaaactagaattggctgtttagattcagtatgtattttttttatagattcaaaataattttgttttgaactgtacaatgaaggagtgtcataagcttttccacatgtagaggctctaaatatcagtctggcattgtgataaagcagagagtttaaacccaatcctatttgtgccccatgaccgttctttctggttacagttcagaaaagtaggaatggatgtgtaactcaaggagaagcatacaatacatgaagctttttctcaaaattttgatttagaaaatgaggtattttagtatgttaattataggcatctcaactgagaagtctaatagcattgggccagaattgtcgcagcagtccaaagccatggataaacttaagttaaagggagcaaatactaacagccttccaaattaatctgtattggagaagatgataaacagatgaatgggaactagaaaccatgcagacttggaactagatataaaacaaacagctatctaatgatttcttatttactctgagcccaagatatttttgtatccttttagttaaacctctgttttactaaggaaatttaaataagattctgtctcttgcaagaaaataacatctaagacatcttcgtatttaatactgccttaattttgtttactccagtggtccccaacctctttggtaccagggattcgtttcgtggaagacaatatttccatggacagggttggggggaaggtttcgggataaaactgctccactactcagatcatcaagcactagattctcacaaggatcaaactagatcacttgcatgcgcagttcacagtagagctggtgcttctgtgagaatcaaatgctgccaatgatctgataggaggctgagctcaggagtaatgctcactcatccacctctcccattctgctgtgtggcccagttcctaacaggcccggtaccagtttgtggcccaggggttgggacccctgttttacactataacatttccacacgtctctcatggcctttcagatccactgcttgtctcaactcaagtccagctacctgaaaattcgattattttttcaaagtgaatttgaatatctttatgttgaatacacagtctccacttttacgcagcccctactgtcttctatcatacctctctagccctggaagagatcaactttacattcacttttcctgttttagggctattattttatcttcaattaccaaaatctatctacatttagatactttaacttgcaaatacatagtaaacaattacagattatttaaaatagcagttttcccatgagtataaaaaaaaagaacaataaaagcaatatttgttgagtattttaaagtgccaggcactgagcagtgtgctttgcttaagtaaatgtttgacaaaataaaaggtcctttaaaagttccatgctttaacattaataaccatataaagataaggttagacttcctatcaaattagcagttttgtgaagataggccttttctgctatatagaatctcctcaaacctgagtgttcgtattatggattatctagtatactccatagctatcaagtttgtgtatgtttctttctcaagcaagttatcttatttctccttatttcttcagacttatcctttcttttcttttcttttcttttttctttttttttgagacagagttgcactcttgttgcctaggctggagtgcaatggcatgatctcggctcatcacaacctctgcctcccgggttcaagtgattctcctgcctcagcctcccgagtagctgggattacgggtatgtgccaccacgtccagctaattttgtatttttagtagagacggggtttctccatgttggtcaggctagtctcgaactccgcccgcctcagcctcccaaagtgctgggattacaggcatgagccaccgagcctggcccctaacctctcatttctaaggaaatgacaaattaagtcttttatgcaaatacagtgtagggtcatttaaaaatattttttgtaataggtgtctctgtacataaatctatttaattttttctcttttacagtaaaaaaggcaatactgtgttttagtttcaccaaaaatttcagtagaccaattgtgtaaagggatacatttatatgaatttttttgacatagtaaaaactaagaggggaagttattcaaatatttcagcataaattccctttccttgaaattgcaatcgtcatgtgtagctacaattcctcagcattcctctgtagtataagtagctacaattcctcagtataagaaacactaaggtggaaaattaattgttaagagaacaaagtcataacaaaacaacaaaacaaaaaagtaggatatagaaacattaactcaatatcactcttgaagctcacataagagaaattattgtactagacactgtggttcatcatccagaccccatcttcatgggaagacatcgatcccacactcatggggaacatcagcagctgacaattcacacctgtacctttcactaaatattgtcctaagacaaactaaaatgaactaactcgcccaaagtggtgcctcctttcagagagcagccattgacccatggctggctaatgtagttatacaaacatgcaactgctttgcatcaatttgggacaactctgaaagaggcccagtaggattggctgaagactcagttcaaagttgtcaaataaagcacaccatgcccagctgaatttacattgtttactatgagtatatcccacgaaatatttaggaattacatatactaaacattattcatgatttatatgaaatttaaattcaactgggcaacttgtacttttacttggtaaatctgggagcttttccttagttgcatctgcatggcaggtaagcatgtcggtatgcccagacctcccttctttgcttccttataagtgcgtcccagaaaacaagcaatcatctcagagccaataggcattgaggcttttgataatcaaactcccaaaggtcaaggaaaaagagagtatcccaaaagcaccaagagaacaaacaaacacataacatacaatggagcttcagtatatctggcagcagacttttcagtggaaaccttacagccaggagagggtgacatgacacatttgaagtgctgtttatgggtcccttcggattgtaacggggaaaacaagaattgtagcaggaagaattaaaagaaaagagagaagctttttttttttttaataatctgatctttttctattgagaggcaggcacccaaatgctgcttctgtcggggagtgaatctgtaaattctttgtaactctgtgctacctatttgttaacctgtgtaatttgttctcctgctgacttcttgcaaacacttgccagtgggtatctgaagcctcttacatcttctgtggcacggacttggcctatatttagcatattcactcatctaaagtgggaagaagaatctggcatcttttctctttctccatcttgccatcaaaagctgcctcaatgagcatgtagccttcagaattttgaaagcaagaagcaggcaacaactggccatgtttagcttcatcttgaaactcttgaggacacctatcaaactttcccaaaactgtctcatcatgtatggttccattgcaggatgggtgcaatgctgagtgccagaaggagagggatatcccattctttccttcttaaaaattgctcccagtctttttgagctctcttcctgtttggaaggagaactaaagcaagtttagttctccttacaaaagagaaaataattaaaagcactctcacttaggtaactaattcactttctatatgataattcttagaatgtctagtcctctctttacataagagtacaggtaattgaggtcagtgaaggttttagttacagaactggtctggctactttttattaaaacctgcaaagacttaactgttcttctataatttagggatactcatcatttaatagggaataaacaaaaatttgagacaaaaggaaattctgtatccatttcatatatatacatgtaaattacatatagaaaaaatggtttagaagaggagttaatatcaatttaaaaacgggaattttaaagctgggaataatacatagcataaatatgtataaggattcagcaaaatgttagttgaaacagggggctaaataaacttgaagtttaagaaagttaagaaatgaacccaaatatgcataaatctgaggacaaaatttgatattgctgctaataaacaagggaggggcatcatattgggaggcttcattaataaaagtaacaaattatgagaacaaatagtcttgttatagtttatctggtgaagcattttaatgaggcatagctgtctgttccattaccgaacgacttttcttatgtgtgctctggtagattttcatatggctacactgaaagatattcccaaatgtctgactaataactctatctataggcaactgttctgaaggtttaaagtaaggaggatggggttcatttagaaccagtgggaaaaaatgctaatgctgggctttgaattttatggatgctgtagctgttatttttcaattaaataaatgttttatatgccatgttttgtagctatcgcagttaaactgccctcatctttttgcccagcaaaaaacccattaagatcttcactgagattgagtctaggtttttataaaattaataactttgctactggtttctcaaaaatgagtagaaatgacttttcaatgcaaatgccagtttttgatacagtgaaattatcctgtctgcagtgactatttgaacttttatcggcaattggacactgagagacttagtatatgaacagatttatccttagattatctaatacatgctttgcaccctgcaccataaaacccgatctatttttaaagccttggttgttctgaaaaatgaaatgaaattgtattaaatggcattttgactggggagaaaaaaaaaaacttcatgtggtttaagagaatggatgccggcaattgactgtctactgtttattcaaaacttatagattagcagccagatgtggcagaaagttggctgatttttcattcacaacaaaaacgatgctgtgcttaatgaatggaggtttgttatcccagtaataagtaaaaggaacatgaaagcccttgtgtttaatgttcatgcaaataagctatttgcaggtggcttttgggcagggtcaagtattttcaaatatttttcaaaactgggtcaagttttttaattgtcaaaaattaccagctagaggaaaacctcctaaaaactttattatgctatttcccaagtaaatgaaatgacaagtcacttatcatttaaaaattacatatgaaaattcttttccttatgatttcgtcaataaataaattctagaggattctagatatatttatttggcatttttttttaatgtggtatcaaattttgtggacattctttagagaatcaaattcttaaaatggcattgaacatttaatttaaaatgtccttcttgaaccatacatgtttattaaaaaattattttatataggttatccattaaaaaacaattttctatatatgtaaacatttatgataactgctcattattttggtccatacttatttatctacctatttattaaacaatacaaatcatacgctttgtaaaaataaaggcctagtctaatattactctctgtcagaaataaaataattcagagaagtctgtattagaagacaaaataaaacaaaacagaaaatgatgagaatcacaaaaccattgccaaatttccagctatggcatttactctccatgtggccttaggtatcttactctcttattttaacctttctttgattactgtaaaaataatttgttactaagaaaccctcttgctttagtagctgtgagtataaaattaagaacataattctcaaaaagtgttttagtcttcctggaaacattttaaaatatcaattaatcattgaacaatacacaatcgcctgatcatttgctaagagagggttgcattctcatctctgttcacttctgtcctttctgagacttacacaggtatgagagctagaaaaaatattaatgtgtagtaattcaaaatttctcattcatgaatcacttcagcagtgcaaagaatactttgtaatttttaaaaggcatttttattaatatacttctactattctaccccaatcaacagcaaatttacctaaatcatgagactactggtacttctaatttttagaaaagaatgacataaactgctaataaacccaatgaatcctttacccgcaatgagaatgtccacgagtcagctcttctgaccctctggccagtgttctggagttactgatctccaactttctaattgaactctagcttggtatgtgagagcagccatgggtgaaccagtggagcaagatttaagccttgacattgccattaatgattcaccacctgttgcaagttcaataagttattcacacaccaaattgtggccgcaaaattctgggagataaactaagttagaaagattgggggtgaataaatgtttgctaaatcagaattgttaatgatagaaatctgtatcttaacaaagttgagaaatcttgtcttcttaacgtgtatttattgacttcccaggatatgtcttagtgaggaaacatagcttctggcatttattattagagtgataaggaataataaaccacagtgcttgagagacagggaaaggcagggggagccagagacacagtaacagaagcagattaattgactgatgaaataaacttgagataagagagcacagaggaggttcaagagatggaaccatatattcctctctatctgctcccaacatcaaggaaattcatagcatattttataatgaatccctgataaatattagtctataattgaaaatctattaaaatgactatttcttagggtacacaaaaatattacaacaaaacaagtaaagaaaagttgccatgggatggaatattatattttcctgcatgtctgcttcaaggcagaatcctaatggtcatgtatgtaggtaaattattctttttacagcaacttctgggaggtggtatttggtgcagtataaaaggcaaggggtgtagtgagggtaaagcgtaagtactttgatcttgagccttgactatattggacttgggatctcggaaatcttggggataagcagtggattaaatccataaattagtaaagtgttgattatacaacaggtagaactacgtgccacttttggagggacagtcttcttttttaaaaaaaacaaaaggccttaaaggctttatgtatatataaagccttttttaattataataaatacatttttttaatgaaacaatctgcacatatacaattccactctcaagaaaggcaattatttacataattatgcagaaattcctataattatgaaaataattgcctttcttcagagtggagttgtatatgtgcagattgtttcattttaagaaaagaaatatttactgatttgattaactgaagttctggatgcttaaaaaatgattaaaatacacagatctactatctgtcttcatgaactttaaatgtcttgtaagaaattcaagtaataaagactacaacatttattatttaactggaacatgtattatttattatcctaactgtggttaggaagcaccattatttattatatctatattaatcaagttgtatcctgtaacaggtttcctgttatccactcatgtcttctaacttctgaagtattgtttaaattacaagggagaaacctagacactacattttctaggatctcaggacaatagagctccaggtgaaattatgctaaataagggcatgagtgtaagatgtggatgtcacagtgaagagatttagagcatttttctggtgacctcctgtttaggtttgacaagcatctaaaatcattgttagcaactttcccataattattgcattttcagcctttatgaaaatagcagcattttttttcctttctttgcccatgcacaccatctaatcatgagataagtctccttctgagtccctaaatacatgacatacatagattgggatctttttctgacctgttcctgtctgatacattcttcaactctaagatgagttcatactcatcttctgaagcccctgggaaatggaaatattttttcatattggatgttggtagagacccatcatttaatgaacatttatgtgccaggatttgtacaagacacttagatacattattcatgtacctcacacaaatgtatcaacaacacaacaaaatgtctgtatgaaataataattattatatcccttatatggaaacagatccagagaggaagatacactagcatgtgtaaatagaggattcaagtattaaacatccatctgtccaactgactacaacctctttcataaaatgctaatttctctcctgcttctaattttcttatcaaaaattgtcatctattgttattgggtctatgggtgggtagtgactccttggtttccattttgttctagcggattactgtcttctttatttttgttctagtgtttattgagagtcctaattaattaacctggctgctctgacttccatcagctcaccattgtctcttctcccagctcataatttctgtaacagagctctaggctatgctgaagttctgctatatgttgccagtctctctagatccaagtgcctcttgtcggccaagtttacatgcacgtgtttaaaatcttcttattgactctatatacaaagtcttcacatgccttcctccttaaaataatagcattgtgagaagaaaaaaaaaatcatcattctttttaaaactaattcaggatgtctatgttatacaacaacaagacgtgggggaatatttacctggtagttctgtccctcgttatcattctcactcattataaaattggtatctgaaaaaaatcttgctgcaaaaacaaaaaaaaaatgtatagggtataaagaaaaagtttgcttcacatcataaccattacccatcccattgccaaagggaagattgtacactacatgattccggggagcagcattcacatagactatagtgtgcatggtacatgcaagagaccccatagtactacccgctttgtcctccttgtagacatgctcacagatgatccatgctccctgacctggagtagtcaaataaaagagtagcatcaatttattaagattctttccagaccattttctaggtattcccattatatattccttcaaatggaaggattttattctgtacatcacatctcactgtacacatttttttctgaaatctgaaatctgagtattttaattttatacagtttcaattgtgagaagtacctgacagactgacctgacctaacactctctaagctaaaacactcataaactagcatagaagctttacacatttatccatttctctaatttacttatctattgtttcctgaaacatctattaatcttgcagttatttgagatgactgtgagcttactatttgccagggatggcatgagcaccttggtttagtctagtgcctggcatttattttcctaaactgtggcagcaagtttagctgtaagcatattttttatcagaacaatcatccatctttaactacatgtgaggaaagtactttcttatattgcattacacatttttatatggccacagaaatccttacttagtctgacaaaattatggtagatttctttctcctaaggtcaaggaaagaatcattctgtactgtttccatggagatgtttctccttttctcaattgccaattgtctactgtgtgtcctgggttccttcttttcatatgtcatgaggattctcaccccagcattctgctcctctgagtcaaagcccttgactttcacttctcaattgttttgtttgcagtttttttgctttcctttatttttcttactctataaatgctatgaaagtgtatgtaaaaatttacccatcttttagtttatatttgttatcaccctttattcatataccaaaccatataggaaatgaatataaggagatctttcttagtaggaggtagaagtaaaattttgtttagaataaaaacagaaaaaaagagaataaaattccatatcaccagtttgcttctaaatgcccaatgtttccacttatgagcttgctactgtacacaacgcaagggcttgtaaaaaattgtctaaatgatagtggttaaggacgtattttaggctaggttactttaaaaaaatatatcatcacttctgccgtcaaaagtgaatttgatgtatcataattgttaaagttgaggagggtcaaggattcttctcattctatggtttccttataaatacactttctaataaatgcctaatttttttctgtgaaattaaaccattagatattgctgaatgtctgtatgtttcttacttttctagaatctcattcttaattatagttttatatttttccttcaacaaagtcttaaaacccatgcagctggtgtctattatttacattctgtgatgtattttatttgactttgtgtttttagtcttttcacagaaatccttttattgtgatcttcttgtccaaaagcacttatttcatatctcttttccatacctatcttcattagcaggttgcatttcagtttcttcagtccttttttagataatatattttactacatctgtcttcacaacactgtatacgctctgatgatcaggtctcccttcttttttttttttaaattctcgtcctctttgggacccgtgacaaagtaaaaggcagatttttttctcacctgacttaaaagtaaaaaggtggccgggcgcagtggctgatgcctgtgattccagcactttgggaggctgagaagggcggatcgcgaggtcaggagatcgagaccatcctggctaacatggtgaaacccgttctctactaaaaatacaaaaaaaaaaaattagccgggcatggtggcgggcgcctgtagtcccagctactcgggaggctgaggcaggagaatggcgtgaacccaggaggcagagcttgcagtgagccgagatcgcgccactgcactccagcctgggagacagagtgagactccatctcaaaaaaaaaaaaaaaaaaaaaaaaaaaaaaagaagtaaaaaggcttcatatgtttctcctctgattcttcttaggcccagcatttccaaaaacaaaatagtacacaaaacattagttgtaatgatacttcaaaaggttcaaatactagtttttggctgctttctgactatatttttcttctaaagaaattttgttatgaagtattgaactattcagtatactttaatattttccaaataaagtttccaaactgatatttaacaatattctcttatattcaaacatattctgaactattttctgctgtgtctctagatcaatatttataaatctagattgttcatgtattttttttcctttgctaactttcaagatcatatcaaaaagcaccactgttgattccattttttatgtttcattatttgaaactatattgacatttttcctcttctttatcattccctgttatctcatctttgtgagtcttccaattaatgttttttcctttgaattatttattttttaactgaaaataaattgtatatatttaaggtgtaccacatgatgtcttaaagtatacatacattgtggaatggctaaatcaagctaaacatacgcattatatgcattaccttgtaatcggaccccttgaggtgtcaatacctcagcatttttagtgattgagataacaaaaattcgaattaggcccttgcttgcttgcataaaagccaacatcccttgttctcacaatacaattgcaaactgctgatttactatttctttgtcaaccaggagaagataactttaaggtaacaaaaaacatttgcagaaggaatgaatgcctataaggatgttgcaactaactgctgaggcccagaagtctggttgctcaggatattatcagagattaaagaaacacagactttccccttggttccctaaaactccccctctcttactgtctagctgcaaaaatatcctctctgcatttttttttttttttttttttttttttgagacggagtctcgctctgtggcccaggctgcagtgcagtggcgcgatctcggctcactgcaacctccgcctcccaggttcacgccattctcctgcctcagcctccctagtagctgggactacaggcgcccgccaccatgcctggctaattttttgtatttttagtagagacggggtttcaccgtgttagccgggatggtctccatctcctgacctcgtaatccgcccgcctcggtctcccaaagtgctgggattacaggcgtgagccaccgcacccggccccctctgcttcgtcttattgttaagacatgtctgagagatcttgccccgttctcactttggccaaatggaataaacttttatctatccccaagcattggtgtgtcagtgtttggtttcaattgagcatcaggtacatgagcccgaatttgggcctctacaacatcttcacctacttactatattttgtgtgtgtggtgagaatacttaaaatctactctattggcaattttcaaatataaatgtattgttattcaccgtagccaccatgatgtgcaatcaattttttgaacttactcctcctggctaactggaattgtgtgtcttttgaccgacatctctgcaatttccccatgccctagcttctgatgactaccaattaactgtctgtttctatgagttttacttatctaaactctctatataagtgagattatgtcatagttgtttttaagtgcctggcttatttcacttgatgtaaagtctcccaggttcatccgtgttgttgcagaagatttcttccctttttaaagcccattaaccttttatagatctggtactgaggcaatgcaagcttattggacaattatatgttatttgaataaattgaaacataacagcttataaagggtcaaatggcagttaatagcctaagaaataggtttggaatattatttcttagcataaaggataatattggtcagagtcttctaggcttgaattcttggctacttagattttatcaagtaaattgtaaaaggatagtcaatcacttttttcacatgaattgctgtatgaatttcgacttgacaagaaagactgtgaaaacaaaaccactattatctgtgaactacctaatgtggaaagaaatatccttaaataaaactttgagaaagtagattactcaattttttcctacagatatcccatatattgtaactaattataatatttaattgaatacaaaatctttcttcttaaggaaagattttattcagttttagaacgttaaagtttctccactctaatatatacagaacttctttaacctttaaaaatattgcttcacttattactcatgataattgggccacatacataattaaaacacaccatttattatttccccttgtaaaagtggcatctggttccccaacttaacttcaaactgtaattttaaacaaataataaagtgttttgaaacattaatgtggttaattgtcttatctattgtctatgttcatcaggagctgtgacatgcccaaaggaaggtaatcagaggaaggaagagaagaagctaagttctagagaatccattaatcatggtttagatgactgaccattttattattttcattttccatttaaaaacgttccatttttaaattggaagggggtatgttttagaatagaataacgaaattccctccatctcctcgtagtgtacgtgattaagaagaacctaacagaaacataaggttctaaggttcttgctggaaataataatcagaactgtaagaattctcttatagaaaacatttaaaaaaggaaattctagcaatagaattcattgttaaaactgtaagtcacaacaatattgtctctgcatgctgactgtactcctctgtaatcttcaaaggcaaacaggaacagtaataatcttttcatgtactctcaacttccttctctgaaaggctagaaaatgtcttatatgtagcactcatactgtcatttaatcaaacccagtttctatttttcttcaatttctagaggaatggctacttagtctttctggcataatgtgaatttcttaagtgtctgtagactacatctcctatttttacttcttgaagtttctctcaaactgtgataaagagtgtcactctatcggtactgttaataatgtaaattttgtttctctttttgttactgccaagattccactgactgttgaaatataaaagaaaaacagcattaaatcaggtgtgataaaatcacctttttctgtttatctccaccactggcatttattggcacttggaaactatttataaactcatactcttgtaacagtcttgtagctgaaacccactggattcaaaatctattcctagtacttaactttcttctgaaaattccctcatctataaatttgaggatgatgataattgcaaagatgccagggaaatttataatcattactgaactaatccttttgaaaatataaagcagcattaaatgttacgattactaatctttttaattaaagtggcaaatgtgtccaaaaatctgtaactaagttcattactctcatttatgcagctaaacttaagttctaccaaatgtatttttaagttgattaaaaatatggttggcagcatttataaatacccattattaacatgctatactggtaaatatatttctgctcttatgactagagagtgttgtactttagtaaaaaaattatacctcaataattatctgctctcctatttttattttatttgcaatagatatgtatttattcatgcatttgtattcttattgaatgaaggatgttatgtcacttgcattgagtacataggcatccctttcgacaaataaaatcagaatctaaactacagaaccaggttcaagtggggacagaagtacaattttaataaaggtcaaagttttgctagtgtttcacttaaaatttatttttaggctttctgaatgttctcttaaagaaaaagacttaatcatatacgtacttttttgtattgttaacaaggaagaaacatactaatatgaatggtactacatacattatacatgttatacaagagaagaaaattatatattcaagataaacatttttataatcacaatacttcaacataaatgtgttcaatatagtaaagatgcaggttgtataatttgtcaagcaaattctcaattatgtttgaattctatttaaaatcaacattagtattgacaatattcatatttaaggctttttaattatttaaataggttcaagtttgctgtgttcagcattattagttgtaaaagtaggctctggtaccgaaaatatatatttttagctcccttctgtcagtctttccattaaatgctatagactcacagttttacatgcttctcagcacctcactgctcttgttgcctataatattttattagtttaatccttctgaaataatcctggtcattcaaaaccaatacatcaaaatcttctagagtgaacaaaagaaaaaacttttgtgaagattaaaagaaaaaggagacttctcagatatattaactttaaagactatatctcacaattatgtaatatatttgttgctttatctaattagatttgcatttcttatatataccatgcatataaaaatatatttgatacaaattataatacaaggcatacaaaaatagaccattataataacagaacattttctaaagggattttaaaactgtaagccaaatgccttaatctaatactacttctaaaatgtattctaaagaaataatcttgcatgtgtggttagacttaattacagaaatattcattgtaacctttctttagaagtgaatattgaaaactgaaataaatctaaatgtccaactttataattgctagttatggaatactaacaaatgaaatccatgcttttaaaatagcatttagtgaagcaaatatatgttcaaaatacatataaaggaaaaactggtatgttattaaagaagatagaataaaatttattttgagagtgtatgctaataagacagttttgatatttaggaaaattaaaatgttaggtaatattttaaataaaaaaataaattttctgtttgctgagattatacgtattttaaacaatttttaatgtacgctatagacactgaacatgtataatttatgtatcaagaaaaaaatcaataagttcaatttttaaaatcaaaattaaaagtcacataatagatcagagaagataaagatgaattacacttttttctttatctaacaaaagagagtgcatggtttatggagacagacaatttttttctctggttttaactctaagatataaaaggaatctattgtatacatctggaaataagaggtatttaatacctaatgtatattaagattactgttttagctttttttttacaatatagaagtactgtgtgatgacttaccttatcaaccattgaaagagccattttcaaagattgattaaaatcgaagagttccataagcaattttcactaaagcattgaaaactattatccaagattaagaaaatacttttctagggatccctcatatctagggatctaatgaccattagatccaccttgtataatggaattaggacaacccaaagatctggatgattgaattgtcatttggggattattaccatcatacagctcagtttatggcaatttctatacatgtgtttagtattaattgaaggaaactcataggaattagatgccagacatgaagactatatacatatcttcagagcgcttgtgtcctaaactgaaaagtgtgttttaagagtctgggatatgaaaccaccttttctctattcttgtcaaatccatgtcattctagctactgacataatttatgcaatataaatacaaataataataagcaaagttatatgaaaatatgtttccagtatataggtagttttaaccattctttttagaagaaatgtgtgtgtgtgtaaatgtcttaattgttaaaatgattaagtcattcacaggtttgttaatgtttttccatgtagctggagtgataataatttgtattacattttagagtggtttgatgcaaataaataagaaccaactcaaaatgttattgaggttaaactccaagaagacaaaaggaaaactaaaataacaaagtaaactataattaaaacatttcaactaagaaaaaagtaaaaagttaagctatctcagacaatgttcgagattgaagcttgttaattgcaatggaaaaactgctaattaccacaaatagtaatttagaggcataaatattacacaggtgtggctgcaggaagttgatattaatcaaacacatttggcattttcaatgttgcaaaaattacaattgtaaacaccttccatacaatcaaatgttatgtgaattttaaatgagtctcaataaattatactgcataaaaacaggatttttactatggatcataattgttaatgtcttccgtactcaaggttgaaatataaatcaattcactctattatttggtttggaagtttaagaggacaattcacatttcctttgatacactctaccagtgtcactggactggtgatgtgacaagaaaggtcttctgtagaactgaattgcaataatatggagattataacaaaattatatatgtacctaagaatattgactttaaaagccttcttcagattgcaacattgatttccagatctgttgggaactagctgccttacttaatgtaacagtcttggcaatggaataatcatatatatcacccatggataattaatttttaatcattgaaattcactgaaatatgttgaacatgaaaattatacaaatataattttgtatgctgtttcagattctttggaattttattctaagcatcaatcaagatggtatagtacgagaaaggtagaacatgtaattataaattcaggattcaggaagtttatttttctcttctttttaattctctcaaaatgatcttgattcctgcaaagtgttagtgtatctggtaagtaagagtctatttcttttaaacttcatctgtattaaccagctttatatgaccaaaatgtcccccaaatttaaatctttgcacagtaaggccttatatgtacacctggcctcatttcaaaagactaaagcagttgttctcaaattcagctgcacattaatataaactggaaaactgtttaagctcctgatgacaaagccacatgtgagactaatttatgctgaatcactgggccaaggacccaggtatcagcattttttaaaactatagaggaataaccagggttgagaaccactgcacaaaatggtacatgcaacttttatttaagttattttttttaaataaataatggttgaatcgatattgatcttagtaccaagtcatggcaattttttcagacttagagaattcatcctggcattgagattattaaagaacctagaaatccaagtgtttttgtttatatttttcctgtaaatattagagtatgctagtgctcatccttatttgataattttggaaaatatattaaacatttgagattgaatatcaaaaatctctaaaagaattttagaaataccattcttctatgaaataagtaagctcaatcaagatacatattatagtgcccatttaagaaagtctaataataatgcttgcactgcttaaagattaggttgataaattaattattgttaatcctacttgcataatcaacggacacctagcgatggagtcttaagtatagacacagaagttgaatacttttaagaacttttaaatttacatccgggttaagttttactttaaaattatgttgagtggttgtgattagtacatgtgtgattagaaccgtctttctcaggttattacatcatcatatagacacaggaaaaataatagaattaaaaataaagcaagaaaaataatgtaacactttattggcttcagataattattttgagattctaatcctaccaaaacattctgcttttcttaacttgatcctacttttgtttgtttgttttaataaaggatgaaccaatatcctgagaaattttcaaatagggctggttataacactaagaacctagatctcactatgttttagaaaaattgtaaagtatttcaaataatcagtaaagtttcagctctgcaccattgtgtctttgcaatatggggaaagtcacttcacttctctccctctctcgtttttggcacatgtaaggcagagaaaataatatctactccagctatcccacatgttattataaaatataataagagatagaaaatcactttataatgttcaaagtattataaaagtaagccatgattatatgtgggattaacagcagtttgttatttaccatttaatgtattcctaatgtacatttttgccatatttaaaaatgtttacatttcgatttttaagtgaaagagtaacggtatgacattatgccatgttatatctgatgccattatgtcaaacaaacaaacaaaagcattttaaactatttggaatcttaccaaaataaatcttataactatgataatacaggtttttgaggatttagtttgtacgcaaaaacagaggcaataaaggcaaaaatagataaacaggattacttagaattataaaccttgtgcagagcaaaggaaacaggagggtggagggtggagaggcaacctacaaactgggagaaaatatttgcaaaccttatatctcaatgtactagtgactatcaccctaataactagtcatgggagcactgtcatgcatttggtatgttttagttttcgggatgctgccacttaccacggcgggagcctgatccctgcggaatcgactgtagctggacttatcttgaatattctgagccaacataccaaaccataaggtgctaattcattcatgcttgaaggccataataatcaatacacattcacgcacacatgtacgttcacgcacacgtacgttctcacacacccgtacgttcacacacacacgtacgttcacgcagtatttaaaggagtgcttccgattaaatccgcagatctgccctccccccatctctgagtttattgttaaattaggtaagccagcccccaaaaacaagatacttaaattgaacctagtcagagccctaaaaatcataatttaaccatgaacactccaaccctagcccctcgattaacgtaattttctaaaaaatcctaacattctccaaccaaataaaatctcctatttcgatgctaactaaatctctgtcctaatacttatataatacttcaggtatcccgctctgaaaagcttgtatcccagatattatagtcctaaatcaaatataacttcaactacaaatggcccctcagcgaaaacctctgctagttcaacttttttaaaggccctaaacttccaggactgtaaaggaccactttagatttatacctaacaagatcctaccctgacatccccctagtatttcaaaataccactcaaatgtttttcacccagttaatgtagcttaattatttaaagcaaggcactgaaaatgcctagatgggtccgcacaacccggtaaacatagaagtttggtcctggcctgttttttgaattcttagtaaaaaattacacatgcaagcatccccgccccagtgagaatgccctccagatcacctggatcaaagggagcaggtatcaagcacgcataaacgcagctcaaaacactttgctcaaccacacccccatgggaaaaagcagtgataaattttaagtaataagtgaaagtatgactaaactatactaatatttatggttggtaaattttgtgccagccacagcggccatacgataaacccaagctaataaaactcggcataaagagtgtttaaggtctacattcagtaaagctaagctccatctaagtggtaaaaaactccagctgaaataaaacgattacgctccttgaggataagatgcatattgtaacaattttctatatcctccacaatgttttgcagattcaataactatttaatgaattgagttaaatttgcctatactcttacgctcataaataaccttctaattctcaattcctctaaaacatagaaaaaattgccaatataaaaaagcaagaaagaagatattaaccattttgtcattcaaaatatgactcattcttatacaactacctttgtcagcattcttgccattggactatctagactttgacgctggtatatcatggcttgttgttagagaaggtaaagtttggaaaacagaagcagttatgtaaagcaatcttagaaaatccttgagtttcccttagaattttgtgtcttctacatgttttctgtttcacatagattaagtttgcagagttatgtcataatttcatgagcgtatctgtcagagagccctttgaaggcctatttaatccaactaagaccattttttattgttttaataccattgaacttgttctgataattgaggaaaaagagaaagacattccatataatacaccagatgcctaagtgctttggatagtcataagccttttctcctatagcttcctatttagaaatgcctgctcttcagagttttcttaagctttccaacttgctccttccattttataagaataatagtctatttaggaagactattatcaaataaaaatcagaatgatcagtggacacctattttagccttgggatttatatcacaattccctaagactttatatttccagaaaagaaattcaaactaaaggtcacaattactattattatagtaatactgataagatgtgcattttaactaaaagaagttcccactatttttttttctttctacttttcaataatccttgggaccttagtaggagtgtgcagtagtcttgtggtgtatttttagtttaaaagtctgagcatacctaattaccacttggtagatattgttcaaactcacttttgaatccaagtgtttttaccctcatagaattttttttaaaacgagtatttgcttgtttctattatactgtaactattggagctactaggaggccttttaaatttcaccaacaagtaggcagaatggagactaactgaagggttgatgggcttaaagaaaataaataacctaacaaaaccaccaggctaatggcaaaaccaacattaggaaccaagtcactttacttgggattagtggataccaaaatgtgctttctcggaagcagcactttacaaggaaatatggaaatccacctttgttgtccttcagctaaagggaataaaatcatgtactttctataattttaaccctgttataacagatgctacatgaactcaagtggaactctgactgccttgagagctgaataaaatgcatcccaccatccgttgcagccgcatcaaggtattaaaaagagagacagaaggaagaggtgagagaggcacaagttcaacagtgtgaggcagtcagacacaatgggagggagaaagaaataaatgtctgaatgtcattgaaagaagagacaatgaaggcatatgtaagagtcctgctaaagctatggaacctcaggagcctatttgtaagaactacaatttagaatagggaacttgcaatacaatgcctgacctttatttcctttcctgcctcgaacttgtgaaaacctttgattgacttttctatgaacatgaattactgttacaatatttagttgaacaatatgaatttctcaaagcagtaatacagcgctacagcatagcttaacattgtttaagtaatatggtttgcttatatttaagtcatttctaagggacccatgcaaacacagtcaggagatctatttctgatgtatttccaaggctagaaacaaaaaaatgctgttaatgcataaacagtcaaaaaaccatgcactgtggttttacagggacctctatttctaaagatgattgttgcatgagggtctctgcctttatgaagggaaatgtgtagattttaactagctctgtttgtgttttgaaaaagaaaatcatgtttctgcactaaaaaataaattcctaatcaaacctttaaagttaacatttagaacagggacagaaacttctgttgtttcctaagtgttttgctgttgttcctgtttagttttaaatcattttttagaagttttattgaggtataaaaaaattgtacacctttcatatattcacctggatgaatttggacatgtgtgcatacaccaatatcatcatcacaaccaaggtactgaacatacttattcacctccaaaaattttcttgtgttcttttttaatggtggtagtatatttttaagaattcagcctttgagcagggtacgaaggaccttcaacaacaaatgcaaaagtaaatgagctaagttcatataaagggttagctctcagtgagttattcaagttatgatcatatcctcaagaggcttgtaaactgactgtgggtttccagtttggttattcacagataggccttcatttgctcattcacctattcattcatatagccactcattcattctcaagaagaggtatttgtccatatctcaccatgtggatgagcagatggtcagttctcacttcttttgccattaagtgtgctcaccgttgagctccaggatggtattttctctcactttgcgtcattaccaaagtggctatcaagattccctcccctaccttctttttcttttttcaatgtttaagagctggagttaatttcttgactcctttggtaacacatgccgatatataccactcaaggcctgttggattaaactgttaaatttgtcatctagctaatgttttctcagaaccagacaaattaaacagagtcaattgttgaaattatttcaaaagataaacaatcatagaatggaaataaactacagaaagtagggaacaggagtaactaagtctcctagaaaacatttgcagcagatgttaagtatccagtctcgttgttataaatgaatttcaaagaatctcatgaggagcagctttacaaaattttactgcactaacaaatggcagccaacctctgtagtaaacacaaaatactgtaccatcctttgtatctccttaaattaagccaatttctgcttacacagaaaatctgtctgtggaaaacactgcttagaatttgaaagcacattaatctggaagccacaacagaagtgtgcttcagaaaacttcttaatatttttcttgtgagttattctctttacgcttttcacattacaatattaccaagttatcataatgtattttctgcactcccagagcaagataagactctagtagttgctgggaactatgcattgtctaaatatgggttcacattctctcacagtgattctggaatcatacacacaaatgagatcactgctgtcagatcactgggattaagactcaacctctctactcactggccatgtaaatatagatacagtactcagatcctctgaggcttagctaattatcagttgatttggtctacacttaccacattaattatttgaaaggattcgttgatataacatgtgctgacaaccataatcattattaaggcaatgtttaccaatatgtgactttaaaacagatactactattagataacaattcatactatacattcaatatttaaacaacagaattataattttgtgaagcaaattttgtactcaaacagaaaatccaattctataattattttctgcaatattgggtcatagaaccaacaaagaatatatgactggcttagacgtatgtaattacttatgcaattagtaataaaattcttcactcattcctagatttgaatccctgatgctctgcgtagcagctgtatagtcttggacaagttgcttaatctgtctgtacctcgatttcctcatttgtacttcaattttcttatgtggtaaatataaaattacttaactcagagctatgaggtcagttttatttgagagaatccagaataaaatacttagcacacatttcctaccattcagcatgcataatacgtactcaaggaaattttagatctctgtacatgattaatatattaaatcctcaaaccgactataatgtctgaaaatgcatgtctttatgtcactgtacctctcactgcacttggcacagtgttgtgaatatatttgtcatttgtatgttctttctaccatacaattctgccactccaattagcatattgtgttggaaaacaattgggtgcttgccttatgttttactaaatttatacggaactacgttgacacttccttgcccttcagatgctggcactcactggttgctttctagttctcaggagtctctgtgtgactctgtcctttacacttgccctgcaacatcaccctcagccctagacaaagccaacatcatttttaaaaacctgcaaatatgtctgcaattcactgtatgaatattctcattctatcaaaaccctgacctcactaactcaatggagcaatacaggatgagaaagtagtttatatgaaagtcatagaaagcttgctttgtttattcatccaaacgtatgtttttaaaggacgaggcttttatctgaaacaaataaaattataatttgaaatttcaaataatgtgactaatagattatgaattcatttccaaatatagaaataattaaaacacttggggtatagaaaaagtgagtgctgtatctattcttttcttatattaattttaccccagctgccagaatttagttttttgtttttgttttttttctttttctttttttgagaccgagtctcgctctgtcgcccaggctggagtgcagtggcgctatctctccgctcactgcaagctccgcctcccgggttcacaccattctcctgcctcagcctcccgagcagctgggaccacaggcgcctgctaccacgcccggctaattattattattattatttttttttttttttgagacggagtctagctctttcgcccaggccggagtgcagtggcgccatctccgctcactgcaagcttcgcctcccgggttcacgccattctcctgcctcggcctccctagtagctgggactataggcgcccgccaccgcgcccggctacttttttgtgtgtgtttttagtagagacggggtttcaccgtgttcgccaggatggtctcgatctcctgacctcgtgatccgcccgcctcggcctcccaaagtgctgggattacaggcatgagccaccgcgcctagcgcaaagatgtattttactaataccacagaggtataatctgctgctacttcttgatcaggagtaaacaagtttacttcacagcagttgatctaattttcttccccattcattcaatggtattttttttattgttatagaacatactgaattggataataagtccttttctttttcttttttcagaaatggtttctactctgttgctgaggctggagtgcagtggcattatctcgactcactgcagcctctgcctcctgggctcaagaaatccttcgacctcagcctcccgagtagctgggactacaggtgagcaccaccatgtccacctatataatttttgtatttttttttttttttgtagagacagggtttcactgtgttgcctaggttggtctcaatctcctgggttcacaccatcctcctccctcatcatcccaaaattctgggattacaggtgtaagccactgcacccagctgagaaggctttttattataggttgttcttattgttttatttatttggtttacttgttggttttcaaggtaagtttgacatataaggtggtataatgtttaaaggtcaagttatagagatagctagattgaagttcaaatccagagccaagttacttagactctctaaggacttgttttttcccttataaaattaaaataaagtggatagccacttcataggtttgtaataagaattaatatgatcatgatgtcacagagttgcaaagagatactgaaacttggctctgccaaaaaatattagctattgccattatgattgttctccttaatacctaaggcatttgctgacagtcaggttactcatcatgtccttccaggaaaaaaactttaagaatgttgaaaacttaggaactacttttaaaatttaattttcagacctgacataacacagctgaggaagagaggtggtagctgattggggatagatgtagagatcattaatggtataagagtgtgagaatgtgaagcaggataggatatgatattactcatacagatcacaaatacatgtcaaaattatatttatcattcatttaagtaaaattcaacattgttttcttcaaagaagaaattgcgcatttcactctacctatttaactctggaaaattttacaaattgagcatgccattttttagtatgaattcctttatttcagctgccctgctaactttggcatgatgagcagaaaaaaaataaacagaatgattagttctgaaatatgaaaaagtgtccaagaaaaggagtagtcttgagaagtagggaacaggatgaagtcactaggggacagaagggtaggagggagtgggaccagacaaacactgagctctgcatgcacacgtaacagtctaaaatagtcatccagcacgcagactctaagtcaagataaccaagatgaattgccaacttctccacaagcaatatgactttgggtaaggtatttgagttttctgtgtcttagtttcttcaactgataaataaaaatgatggtcatatctacttcataaaattgtgataattgattaatacatgtaatgaataacgtttggcatttagcttaataataagacttttcattaaaatattagctacttttgttagctagcaactctcagttttgcctaaagctgaccccatatctagggtgaggttttgaaagaaattcaacaccatcagaagtaggtctggaagttataaaggaaagcttaaagaaacagaaatatgtgcaacacctatttacaaagaatccattgggaaaaccccattgagcccagggagatggcacatgtcccctttggttatggaattcagttccctgacggtcagtatactgtctttgttcccaaggcaaactttttaataattgtgatcccactcaatagtcatgttcacttactttatgggtacatttgtggcatattttaaaatgtgaagttgagtgcatttcacctgaaaaccaaaggcatgtaatgacaacatgctatagaggaaaaattattgatttgtgtaaataggcagatcttgtttgtattctagctccatcacttactaattttgtgatatgggcaatttatatcctatctgagcctgtgtttcctctacaatatgaggtaatttctactttgaagtattgttatgagggttaaatataaattactttctggtttatgatgttggtatatactacttctatgcacaaccgttatttttatgaataagattttaacagtaagccacagaaaatataatgtaagactgattcttagaatctatcaaaacaggttgtaaaaatgacttaaacatctagcatggcagtgactaacattttgaaaagcttaatttttccattaagaactatagcccaacacagtgtctgtgcttcagtgttcctcttatcaggaaggataatatgtgtgatgcatggactaactctaatgaaaatttttattcttaagacacaaaatatttcccagcacagtacataaggtctttgtgcttatgtcagcattggagataaatttctgggaaagaagtagagaaactgctcatttctatagacatcaaaacaccaaagtagccgggcgcggtcactcatgcctgtaatcccagcactttgggaggccgaggcgggcagatcacctgaggtcaggagttcaagaccagcctcaacatggagaaaccccgtctctactaaaagcacaaaaaattagccgggcatggtggtgcatgcctgtaatcccagctactcgggaggctgaggcagaagaattgcttgaacctgggaggtggaggttgcagtgagccgagatcgtgccattgcactccagcctgggcaacaagagcaaaactctgtctcaaaaaacaaaacaaaaaaaacaaccaaagtaaaagtgaaaataaaggtacacagcagactttttctttttaaatacctaaactgaaaagtatacctgtcaagaaacatccaactcatgaattactttaaatatgtttttaaaacagcgtgcttgttttataacaatagattcatgctagttatctgatattccccagtggttgctttgtggagctcagtgtcatccttggagaacatgggcaataaaaagcatttcttctgcaccagtaagacaaaaacaaactgactacttctcacataaaccttggagggcttccctcagtggggttagtgatcagcaaatcatgtcaaataaccccttttgttatttttgacataatagtgttcctagcagacagtactcaagaattcccagattcttagctgtaacataaatttaatatactctcttttattaaaagtcaagctgtttattcacagtagctcttaggtctacgtttcattttacacatatatgtggatgtaatagctttttccttagaacttttaaaaaatagaattcagtaaaagtcctatatttgtattttctatgtgtcaagaacagataagcatcattaatgtgaaccaaatttcaattgaggagctgaaattaggaagaattgaaaaacacctgaaataaatcttcaagtaataaaggggaaagtttactttagaattagtgtatcaaaaatgagaaaattggctgggcgcagtggctcacgcctgtaatcccagcactttgggaggctgaggcatgcagatcacctgaggtcaggagttcaagacctgcctggccaacatggtgaaaccctgtctccactaaaaatacaaaaattagccgggcatggttgtacatgcctgtggtcccagctactcgggaggctgaggcaggagaaccgcttgaaccccggaggcagaggttgcagtgagccgagatcacaccactgcactcgaaactcggtgacagagcgagactccataaaaatcaatcaataaatcaatcaatcaatcaataaaactttttaaaaagtcattgcattatttttaaaaaattaatagtttcaaaatgtatacatgtaaaatctaactgggaatactttgtatctacttgtagcacaagattaaatttattttcaattactaggagatttgcacaatagagtatatatttactttaatctgtatgactaaaagcctcattgtcaatgtgactatgtcatcattatcacattcatgaatctcctgattataacctgcacagatggtctacctacagggctctgggataagaaacttgctgtctgtctacagaggaagccgttttcacttccagatagttctgaatatttgcaagtacttgctgatttagagtcaaattatgtcttgctgtaacatccatgttactgaacttacatttgagataaaccaagattagactaaaccatgccttcaaatgacactctcaaaaatgtgatgcaatttatgtgccaaaactatcctatcttgccattttcctccattttttaggaaaagcatggtcctagttttgttagccacagttgacactactattttaaatcactatgtcatttgtatatcctacatttgaacactctttagtgtcttcaagttaaaatatgcataaaaactgcacgtccaggatactctacctggagaaaaacatagctctcattaaccttgtccagacattaaacttataagagaaaaatcattattttcctgtaaccaaattactctgctaaattgtttttaggcaggattaataaatctttactgtaaagggaaagaggctaagattttaggttttgtgggccatataatctctatacaactgttcaactctgctgttgcagtgagaaagcatttatagacaatatgcaaatgaatgagtgtgtccatgctgcaataaaatttaatttattgcagtctattggctggatatggcctgcaggccataatttgccaacccttggttgacagtatagctagctaaacactgcttgttgtagtaaaatcttgctttttaaaacatatgtctctcatcctagtattgtcattacgtgtgtgtggtttattgttaaatatgtaatatttaagggtctttcctatttagttttattaactaaaagctgtttcataattgtaatgcacagacatctatataggtttttattttatcattcaacctattagctaatccttagagttgtttcatttttcatgtgtttgacagatgaacatgtctaaaacactgatgataatgttaccagaatataaacaaaaatgaaattttcaggttaaaaccattttgttagtaatatgtaagtatatcaattaaccattaaataatttaccaaattattccattacctaatccatattgctccttcttgtccacaagaatatagtaaggtacattgtcaaatacatacctctgactttagtgggcatttaatgtattattagaggatcctgatatctgtctttcttaaagaaattaaactcatccctagtgattatactttcttcatctaacactataatattaataacatttgaaaaaataatgtctaataattaacactagatttacagagtatttttagacaattttctaaaattatctgaaaaatttgaccagaatcattgtaaaattcacatctgagcttatgaaagcccactttattccactctaaaagaacaaaattttgtacttttaattttatcttttaaaatgttttaacataaaggtagtgggagacgttactaaaggaagcttagatagtaacgtatttgttgtctcagttaacacaaagaccatagatggggcagatctgcaggatgcaaaaactttcctttttctcacctcatagtagtcatatggctactgcaattctctggtttcatgtgcttacaaaatgtcctttagttaaaaataaaaagaaagagaaagagaaagagaaagaaagaaaaagaaagagaaagaagaagaaaagagaaaaaataatttcttcatgtgtctatttaaattaacaaagacgtgaattgtcccagacctccctgtgatgagtaacttcatgtgtcagttttactgggctaagggttacccacatggctgataaaacattatttctgagtatgtctgtgtttccagagaaattagcatttgaataggtaggctgagtgaagaggatcatcctcaccaatatctatgggcatccttcaatctcttcagagcccaaataaaacaaaaaggcagaggaagggtgaatttaatctgtcttcttgagctgggacatccatcttctcttatcctctgatattggaacacctggttctcagacttttgggcttaggttgaactatatcactaactttcctgggcctccatcatgcaggcaggagattgtggaatttctcagtctcgacatccttgtgagccaattcctcccaagaattatcttcttctagctatctctgtctctttctctatctatttcatctgtatcagtatctgtatctctgtgtcgtctatatctgtatcatctgtatctttatctcatctgtctctatctctatctctacctctatgtctacatctgtcttagttatctatctcatttatggttctgtttctctggagaaccttaactaatatagtccttatcttacaactcacttgccagcttaccatgattataaccaagttgatcacttcaaaagaatactaaataatatatattgtttacactaagagatagctagctactctcctcaagctgaatctggcccccacctcacttagtagagcaagcaaactaaatgtagattatacattttttactcattgaaaaaacccaaataataacttatgacatgctaaaatttaaattttgatatacaaataaaattttattagaacacaattatatttattcatttacatttacattatttgtctatggctacttttacactaatgcagcagagtttgttagttgagacagaaacaggccaataaagaccaacatttttacaatataaccctttaaaaaaaaaatggacccttggtttagactgatcaataatcctatgggaggattttaatgattttcatctgtagccaaccaagcacattttttttcttggctaggataaatttagaacatctatgtccttccttaaaatagccccacatacttgaaagtctgattctctcataactatatttttttctctgctgttaaaatttgaactcattctcttcagaaataaagaaagtaacaaaatagaaactaagcagtcccatttttattttgccatttatgagggcctatgccatctagcggtgatttagtatgtatttaacaaccagttcactgagaaaaactgctgtatttttagtttgcttaatttagtggtgttgaatatttcctctatgaccaattttggcttacgaatatgatttctttgaatgcaaagttgggaggagatgagcactgtgtgctcctatgaggagttccatctggctcaaacataaacactattaacatcactttgctcaagacatgtgattctctttcataatgcttcttgcattaactgcaatataaaagttacaatccttattatttttgaaaaactcaatttgtataggactcttgataatattttaatatgtatacattttataattttattgatattttttcttcttttatacttttttttgtttatttatatagtttgttttcacattaaatgggagaaatactgacattgttcaattcacacccagggaaattctgtgtgaatgatatcatattatatttcttttaatgctctaaacaatgttgtgaggtaagtgttatctctgatttgcatatgaagaaacatattccgagattaaaaaattgcccagtttcacacaaggaataaattggagcacaggagttctatatagatagacctgtatgacttcacagagtgaaatggacagataaacaattcactttccaggagaaatcacaggacaatggatatcagaagaaatgatgggaccagggtaatattggatgttttgtatataaaaaactaatgtgggcaacaaaaaagcatataaagtcactgaagcaaaatatatattgtgaaatctaaaagaaaatatgctattggtaggccatggctacattataaaaaacatttcatttcacataaagtatgaatactacactatgactatgagttaatattaaaaaattgaccacataggaaataggagaaaaaagtaacaacactgtggaaagcaaagaaaatgactgcaagatgaagctatcaccaccatctcgtggccacatacggacctcctcagaagcttagatgaataaagggaagagactggagttattaaaatttgtaaactcagagtaaaagccttcctgagctgaggctagacctctgagggagagaaatgttccaactgctgctgttacctctgaagaggcactttctggggctctgaaaaaattggtaaactgaaacaattactgctcctagggcaaggggatgttcttgggagaatatcagcaaggacagcaaacaaacaggaaaaggagatctattcttccattctcttgcctatgtttctctagtacctcccaatagcagtacgtagcaggatcccacttgaaggaacttggaaaacgtagcttgctgatccccatcacggcatcatagcaaatttatttcagagaaatgtggctaaagatcaagattattagtaaatcaatttttttacctaatttttaatctgtattgatttcttataacataaatatctgtggttacagagacctcagtattttctttttcttctgtagcagcatttcaatcttttttgaagttctacctctctttcactgctagttcacaccatgtgagagcaatggacctaatcatcatgggcagtggtcataatatgtctcaacctgcccaaaataaagatgctaccccattaaccatatgttttattttgtaatacgatcatgatccaacctagtctaatgagaaacttaactagaaattttgttggaattattgaggaaaacagtgttcattttctgaaaaagtagcttagctagtaagatataagctcagtgctactagtggccatcttgatgtggaacaatactgagaatatttcttcaggtaatcctacaagaaatgtgtgcaaaacagaaaagaggaagttacaatgagaaatttcttacgtactatattcagtagagcctcagggtagctctaaatctagatacttaataagaatactactgataataaataatactcatatagcaaatactatgtgctaagcattctttcatgtactttataagattaatatatctaatacaaggactgtatgagatagatattattgtccagttttattatgtcctgcaaataaaatgccctgacaaattatattctctcaatcatctttcctttgtttgcaatcaacattttatatgtattcacttattatgtatcactcctttgattcctcaaaatttatttagggctatataaatattttgctactactggaattagcaaaactttaaggttaaattttcaaacatgttattgccctcatcatactgtagcaagaattagtaatcaatgatacataaaccctatttatttatccaaattattccatttcacatcctcacaaaggacactattctgtcaccatttaaccctgttccccaaaatctcctcataaatgcagtttcaaaaacagcaaatagataaattggactttattaaaattaaatttttttttttggtgaaatggagtcttgctctgttgcccaggctggagtcagtggtgccatcttggttcactgcaacctctgcctcctgggttcaagcaattctcctgtctcagtctcccaagtagctgggactacaggcacgcaccaccacgcccggctaatttttgtattattagaagagatggggtttcaccatattggccaggctggtctcgaactcctgaccttgtgatctgcccaccgtggcctcccaacgtgctgggattacaggcatcagccactgcgcctggcccttaaaattaaaaaattttttttaaagtttttatttttttgagacagggtctcatcatgttgcccaggctggagtacagtggcgccatcatggctcactgcagtttcaacctctctagactcaagcggtcctcccacctcagccttctgagtagctgggactgtaggcatgtgccaccacatcccagtaagttttgtattttttgtattatagaaatgggggccaggcacagtgctcactcctgtaataccaacactttgggaggccaaagtagatggatcacttgaggtcaggagttcgagaccagtctggccaacatggtgaaatcccctctctactacaaatacaaaaattagctgggcatggtggcacgcgcctgtaatcccaactacttgagaggctgaggcacgagaatctcttgagtctgggaggtggaggttgtagtgagctgagaccatgccactgcaccccagcctggttgacagggcaagtctgtctcaaaaaaaaaaaaaagaaagaagtggggtttcaccatgttgcctagactggtcttgaattcctgggctcaagcaacctgcctgccttggcctcccaaagtgctgggattacaggtgtgagccactgcacctggccaaaattaaaaacttctatgtttcaaaggacatcattaagaaagtgaaaagacaacctacagaatgggattaaatatttgcaaattgtgtatctgttaagggtctagtatttagaatatgtgaagaactatcacagctccataagaaaaaaacaaataatccaattgaaacaatgggcaggccaggtgtggtggctcacgcctgtaatcccagcactttgggaggccaaggtgggcggatcacgaggtcaggagatcgagaccatcctggctaacatggtgaaaccccgtctctactaaaaatagaaaaaaattagctgggtgtagtggcgggtgcctgtagtcccagctactcgggaggctgaggcaggagaatggtttaaacccaggaggctgcagttgcagtgagtggagatcgcaccactgcactccagcctgggcgacagagcgagactccgtctcaaaaaaaaaaaaaagggcaaagaatttgaagagatatttctccaaagaaaatgtgcaaatggccaaataaacacatgaaatacacacatgaaaaggtgttgaaatcattattcattagggaaatgcaaataaaaatcacagtgaggccaggtgtggtggctcattgcctataatcccagcactttgagagactgagtcaggaagatcacttgagcccagaagttagagaccagcctgggcaacatagggagataggcgtggtttgagcctgtagttccagctagtcgagaagctgaggtgggaggatctgcttgagcctgtgccgtcgaggctgcagtgagcagtgatggcgccactgcactccagcctgggcggcagagcaagaccctgtctctaaaataataatgataataataataataatagagataccaattcacacccactagaatgactataataacttaaaaaaaatctcaaaaaaaaaaaacccaaaaaacaaaaccccaacaactgttggtgaggatgtggagaaatgggaacccttatagggttccttacttatagggatgtaaaatgatacagatgctatgggaaacagtctggcagttcctcaaaaagttaaacatacagttgccatatgacacagcagttccattcctaggtcatcccaagagaaatgacaacatatgtccatacaaatacttgtacatgagtgttaatagcaacaatattcataattgtaaaagagtgggaacaacctaaatgtagatcagctgatgaatggataaacaatacgtggtccagctgggtgtggtggcacacacctgaaatcccagcgctttggaaggccgaggcaggtggatcacctgaggttggaagtttaagaccagcctgaccaacatggagaaaccccatctctactaaaaatacaaaattagccgaacatggtggctcatgcctgtaattccagctacttgggaggctgaggcaagagaatcgcttgaacctgggaggtagaggttgcagtgagccgagatcatgccattgcactccagcctggtcaataagagcgaaactttgtctcaaaaaacaaaacaaaacaaaaacaaaaaccagtatgtggtccatccatacaatggagtattattcagccacaagaaggagtgaagtacagattcatgctgcaacatggataaaccttaaaaacattatgctgagtgaaagaagccacgaaagatcacatatggtatgatcccacttatatgaaatgtttagaacaggaaatccatagagatagaaaagagatcaatggtttctaggagatggggagggaggcaattgggaatgactgttaataggtatgggattctttttaggtgatagaaatgttctggaattagtgtagatggttgcaaaatgtgaatacgctaaaactactgaattgtatactttgaaatggtaaattgtatgctatgtgaattttatctcaattaaaaaaaagtataggccgagtgcagtggctgaagcctgtaatcccaggctttgggaggccgaggcgagtggatcacttgaggccaggagttcgtgaacagcctggccaacatggtgaaaacccatctctattaaaaaaacaaaaattggctgggcgtgttggtacatgcctgtcatcccagctactggggaggctgaggcacgagaattatttgaatccaggaggtagaggttgcagtgagccaagatcacaccactgccctctagcctggtcaacagaacgagactgtcttgaaaaaaaaaagataaattatggtatttgctttggaattaaataattagtaacctttagtaaggtttggtaaaggtttagtaacctttagttaacccagttaacttctgtgtcttatgtttgtctttgtactgaagtagttgaatgccactgacccacagaatgagttgccagagaattggagcaacattctgttgtgggaaagagaatactctgttctaccttaaaattagattcccagcatatcaattgaagggttttaaatagtgagtgatgtgtttcaatttatatttatattatatttacacttgatcttagccaaaagtctgagaagtgattttatattatatttataaagatcactttagctttctcctggagactggattggtagggacaaggtgacattggtgaacttggttagaaagtcagtcaagcccatgtgcagtggctcacgcctataatcccagcactttgggaggccaaggcaggtagatcatctgaggttaggagttcgagaccagcctggccgacatggtgaaaccccttatctactaaaaatacaaagattaggcaggcatggtggtgggtgcctgtaatcccagctactcaggagattgaggcaggagaatcacttgaactcgggaggtagaggttgcagtgagccgagattgcgccactgcactccagcctgggcgacagagcaagactcagtctcaaaaaaacaaaaacaaacaaacaaaaaaccagtcagtactctagggaagaaataacaatagctatattatgacatagtagtgagttgaagataactgaatagccaaaatatattttggagatagtttgatgtgagaggcgaggaaaagtaagtagtcatgtgtggctctttgtttctggctttaataactccagtagttctggaagagacttagtgggaaaattaaggacattttggataaattgagtttgtccaaatggggttgccaagtggagagttgagtaaatgaagctagagctcaggaaagatgtggaccagagttataagtcatatttatttatttatttattttgagacagagtctcgctctgtcgcccaggctggagtgcagtggtgcgatcttggctcactgcaacctccgcctccggggtcaagtgattctcctacctcagcctccagagtagctggtattacaggcgtgggccaccatgcccagctaatttttgtatttttagtagagacgggggtttcaccatgctggccaggctggtctcgaactcccgactttaggtgatcctcctgcctcggcctcccaaagtgtttggattacaggtgtgagctactgcgcccagcataagtcatatttaaaacaatgggaatgggtaggaacacctagggatagagtgtgggaaatagagtagggtccagtatacagctgtgccaaatttcacatgtacaggttagatagtggagtgggtcagttctattgagaatgccctgaaagtttgaataatgataagcacgtccattttaacatcatgaggtagtggtgacgttgtaagaggagtttcagtgtagtgggttgtcatgggttaaaacgttcagattgtcatgggttaaaacgtgaattggatatgaggaagtggagtgtgcaaagatagttttctgaaagttttacttggaagaggacaaaaaattgagactagacagtttgaggaggatgaaaggtcaagaattctaagctagtgataaaaatttcgtcaacatcaatgaataggtaatgtaaacacattaatcctgggatggatgtgagaagagcaaagaaaggagtcatgggggaatatcagctctaaaggttgagtagagaaggaaggagtgatctgagaggtggaaggaggagtaggaattatcatagaaactttaagcttcttgagggcttgtgactgtgtcatgttcatcattttatctgaagttcttatcaacaaagtagctttcagtaaatatttattaaatgaagacaaaaattttaagagccatctgcaatgtcaaatgtagcccacagttgaatgaatatgaggaccgggaagtgtcccttgattttggagttaagcagctgattgccaccttctgtagaacagcttcagtggagtctccatgatagaaataaatgccaggttgctgaggactaagcgtggatatttgttgagagtggagacagtaagtgcaaacattcttttcagaaagctttgctctttttgaagctttgctcatagggagatacaagatagtaggtagaggggcaggctgtgtttagatgagagagacttcagcatgtttatatgctaaatggaaaaaggaaaaaggaagggagaagttgaagatgtagaataaaggaggtgtgtgtgaatgattgtacattgtctttgaggttagtgggaatggagtgaagatactgggttgcagtacagatgagaatacagtttccactgaagtaggaataaaggaacaatagatggtgcagatggggaagtgtttgggtggcaagtgagaattctggatatcaacactttatttttttcagtgaaggggggataaggtcatccactgagattatagtggggatgaaatgatgattgtaggggactgaggagaaaaggagaatttcaagaaagcctctgagggaagtgagagggcaagctgagtgggaatacttagaaaaaatggaatcatggatttttcacggctgtggtatatatatttgtatgaatgatttcctccttctctcagggctcagcagcctgggtgagcacacaattgaacagttggattggtcttggcctgggttttatgcgtcagtgtgacagagagggtaaggaggcaagatatttcagtagcgagagtgtttgaagtggtgggccattgagtctaggctgaatagggaacaaatgacaccagaaggtggctgctgggacatgaagtggttggtgttcaagactggatagtggaattgaagattgaatgggaggagcagttgctgggtatgacagaatacaggatccagctatggagtgggtttatgaagtagagacaacgttcccaagtctttagtgaacatcagagagtgtcatctgttagaactttagctgtggccaggcaaggtggctcatgcctgtaatcccagcactttgggaggccaaggtgggcagatcacctgaggtcgggagtttgagaccagcttgaccaacattgagaaactccatccctattaaaaatacaaaattagctgggcatggtggtgcatgcctgtaatcccagctactcgggaggctgaggcaggataatcgcttgaacctgggaggtggaagtttcggtgagccgagattgcaccattgcactccagcctgggcaacaagagtgaaactcagtctcaaacaaaaaagaacttttgctcaaaggcaggtggtagcagataagaggtaaggaaaatttagtgaagaaaaattcagtttttaaaaacgttttaggctgggtgtggtggctcacgcctataatcccagcactttgggaggccgaggtgggcagctggcttgagcccaggagtttgaaaccagcctgggcaacatggcaaaacctcgtttctacaaaaaatacaaaaaattagtcaggtatggtggcatgcacctgtagtcccagctacttgagaagctgaggtgggaggatctcttgagcccaggaagttgaggctgcagtgagctgtgattgtgccactgcgctccaacctgggcaacagagggaaaccctgtctcaaaaaacccaaaaaaacaaaaaacaacattttattttggtgatggaattctctattgtttcgaagagttttgtttgttttaaagacattaaccagttttctcgagggatattctatgaaaaagtgggttccatcatccaataagtttgagaaactgcaaactctatcccgttggtaattcacaatgaacctcaacttagattaataaaggctctgggaaatgatgttactattaatgatttaacatttattgagcactgtctaaggctctgttctaaggctcccacatgcattattgtttccagtctttacagcaactatctcaatttaagtcacacggctaagctggaatggaagagctgggattcaaatccagaaagacttgctccataggattctcaagcctataaccagtatggaaacaggcttgacattaaatccagcatttccccatcttgtttggttatggaaccttattatcttttagtatttatagagagattagtcagttgtccacggcatggaccctgggaagtgtcgcctgagtcagtttacactggtgactacagtcttttaaacagcattgtttcagactataactagttttttctaacttggttctctgttgataatacttaaatgttatatttatttttctatttgagagccttatattttgacttcaaggcattttctattccctttcacaatgaccttcccaggaatcaaagatattgtcaccaccacacattacatttgagttactaaaacagtttataatccaaatagctatttcactttcctttctctggtctaagattatcttattgtaatttgttttttaaatttagagacagggtcttgctatgttgtccaggccagtctcaaactcctgagtagctgaaaatataggcatgtgtcacctcaaccagtttattgtaaaattttaatgtttagagatcttggagatcatcttttatttttaacagtatttatttagttttgcaggtagagaaaatgacagctgtgtagtgctgtggaaattataataattcatatccaagcttgaatgtcagctctacctctttactatagctgtggccttacaaaacctacttcgtttcttgaaacttgtttcttcctctaaaaagatgaggataatatcttgcagggtggctatgaaaattaagacagttcacacagtatctggcacatggaaagttctcaatgttaattacccatttttttctgtttaaggaaatagtctcaatcctataccatgaatgaattatgaaaatagttggaaaggaaacaacagttttaaatgtaaactgtctcagtcttatgctgacatcagctacatttctggtaaagtgatggtgtcatgatacaggttatattaagagttaaaaccagtttccttctggctttccaactgacataataagcaaaacctgcctgggcaaacatagacctatttattggctcacttattattaatgttaaagtagctttggtgctgacttctcctgttcttgttttaaaatttcactgttgtcatttgaaatctgacagaccttcagaagcttcatagaatgcttaatggtttaaatcgtctctagaacatgtgaagtatcttttccaaagtggttttctccatctgtcagtatgttcaaaatcatgtgtatagggccgggcgccggtggctcacgcctgtaatcccagcactttggaggctgaggcgggtggatcacgagatcaagagatcaagagatcaagaccatcctggctaacatggagaaaccccgtctctactaaaaatataaaaatcagctagccatggtggcacgcacctgtagtcccaactactcgggtagtcccaactacttgggaggctgaggcaggagaatcacttgaaccagggagacggaggttgcagtgagccaagatcgcaccactgcactccagcctgggcaacagtgcaagactctgtctcaaaaaaaaaaaaaaaaaatcatgtatataggacagaattgcttatattttcacatttactactggatgcctgtttggttttcatagcaatcaacttttggagtttatgggcagtacttaacatatataacctaagtgtggataattatttaaaataaggctattggaagaaaaatctatagggatttctcagttttcacaacaactccctgagcaaagaaaaaataggttggtttgagttgtatgtgatgagatttctaatattctatttgaaatgccccctagtaagcactagtgataggtattaatgagctgaatttgatttccagttccaactctgtcccttgcaacttctgtaaccttgaaggtttctctacgtttcagtttcttcatatgtaaaagagattaccaatatttccctcccaaggctgctgtaacagtgaagtgttgaggtttttatttatttattatttatttatttatttatttatttatttatttatttttttgagacagagtcttgctctgtcgcccaggctggagtgcagtggcatgatctcggctcactgcaagctccgcctcccaggttcatgccattctcctgcctcagcctcccgagtagctgggaatacaggcgcccgccaccacgcccggctgattttttctatttttagtagagatggggtttcaccgtgtcagctaggatggtctcgatctcctgacctcgtgatctgcctgcctaggcctcccaaagtgctgggattacaggtgtgaaccactgcacccggctgtgttgaagtttttaatatagccagcacagcatgtggcacatagtaggcacacagccattgcatgtttcttccagacatctcactgcatttttcagtaatattcttttcaagtacgttcttctttctcattccttaacatttaaaagctatattcaagagagaatattaatgtttgccaagtaaactgaaaatatttcctttgcagcccacacttaagagtgttttaggccgggcgcggtggctcatgtctgtaatcccagcgctttgggaggccgaggtgggcggatcacctgaggtcaggagttcgagaccagcctcaatatggagaaaccctgtctctactaaaaatacaaaattagccgggtgtggtggtgcatacctgtaatcccagctacttgggaggctgaggcaggagaattgcttgaacccgggaggcagaggttgcagtgagctgagatcacgccattgcactccagcctgggcaacaagagcgaaactctgtctcaaaaaaaaaaaagagtgttttagcaaaaaatgattttatgtatgacataccttggtttaaatcctggctttttaattgtaatttttttattttttgagacagggtcttactctgtggccaaggctggggtgcagtgatgtgatctctgctcactgcaacctccgcctcccaggctcaggtgattctcccacctgagccacctgagtagctgggagtaaaggtgtgctccactatgcctagctaatttttctatttttagtagagacagagtttcaccatgttgcccaggctggtctcaaactcctgggcttaagctatccaccagcctcggcctcacagtgttgggattacagttgagagccaccaagcccggcctgaatcctggcttttgaatgtaatagtgttgtgaccttaggcaagctacttaacctatccctaaagtattatgaggctaaagtgagtaatagtatgtataaaacatctagttcattgtctggtttgtatattcccaaaataaatgttattattttaagtggaaactgttgtttaatttgataattcatataattcatggcttttgagagcctgctctactcaaagcccgttaagagcaggcaggaacattgtgaacgaatgttgggcatattattatgcaagtgactgaatttggccttgcctgtaatcaggttcagcaaaagtggtattttctttctttctttctttttttttttttttaaattgagacagtctcgtcctgatggccagactggagtgcagtggtgtgatcttggctcactgcatcctccgcctcctaggttcaagcgattcttccacctcagcctcccaaggagctgggatcacaggtatatgtcaccatgcctggctaatttttgtattttttgtagagatgggggttttgccatgttggccaggctggtcttgaactcctgacctccagtgatccacctgcctcggtctcccaaagttctgggattacaggcgtgagccactgaacctggccaaaagtggtattttctattgcatttgaggtaacagaaattgatgggcttgttattgcatttggcatggctttttttttttccatgttgtctttctccactgactgtcaaaaaaaaaaaaaaaaaaaaaggctacattcatgagtgccacaagagagatccatgattcccaagtgctacagcagaccaaggtatattttggtatctaaaatgtttttcatcttttgctgatcttgtttattagaaataaatatgttactctcctgtattaaaatttaacacaatattggcaagctaaatttaatcaaatattctgcccattttaaaattcacttcctagcctgtccatccttccttttattttgttgtttgattttgttttattgtatgcttttagcagcctgaagccatggtttttagtttctgtctgtagtgataagtggaaaggagggatgaggaaggggctttactggcccaaccagaaatagaaactaagaacccaggactgtattatctcccttggacacccaacactatataaaattgattcctgccctggcagactaagcattggaaagctggtgctaagagtgttatgagaattcctaacaaatagaaaagctcaaggattgacactatagtaaaagatttcattttgacatgtttataatttacttatcaagttaacaataaggtgtttttatttatttatttttgtttatttttattttatgttttgagacggagtctcgctctgttgcccaggctggagtgcagtggcttgatcttggctcactgcaagctctgcctcccgggttcacgccattctcctgcctcagcctcccgagtagctgggactacaggcacctgccaccacgcttggctaattttttgtatttttagtaaagacggggtttcaccatgttagccaggatggtctcaaactcctgaacttgtgatccacccgccttggcctcccaaagtgctgggattacaggcgtgagccactgcacctggcctttttttggtatttttagtagagacggagtttcaccatgttggctaggctggtctcgaattcctgacctcaaggcctgccttggcctcccaaaatgctgagattacaggcatgagtcccagtaagatttttaaagggataccaaaataatcaacatttattttagaaggtgactttcttcaatgagatgtcaatgtctactttctgttatatagtgctattgtttcttttttcttttttttctaagtgagggtctcactctatcacccaggctggagtacagtggcatgatctcgggtcactgcaaccttcacctcccaggttcaagcaattctttcacctcagcctccagggtagctggaactacaggtgtgcatgcctcgctaagttttgcatttttagcagttgttggccaggctggtgtactgtttcttttattgactgagatctatatttacacagcatgaaagtctcagttgcattaagtacattcgcattgttatgcaaccatcaccattatctagttccagaattttgccgtcaccctaatagagcttgtatatatgtccccaccaaatcttatgttgaattgtaattcccagtgtttgaggtggggtctggtgagaggtgtttgcgtcatggggcagatccctcatggcatagtgttgtcctcgcagtagtgagttagttctcacgatctccttactccatccacctgcttctcctaaaactttgaaatacgcttggaattgaaagtgtttagtttagattgaggatagttatctaaaagtgacatacagggctcctgctttgctcttccttagtaaatttcctattttattacacagtttactaatacagaggacttgagttttgttatttccatggaaaacattattgaatctaaatttaactagagatgtgtagttcagggagggagagtggttttataatatgaatcttggatttgaaatgaacttaaagcaaatgaataaaaattgtttcattaattataatgtctgaaataatgcatgtttttgtgaataaaaattgatataataaagtttaaagtgacaggagtagatataactaattgtatttataatttcttggaagtaaaataacatttttgaaaaatattatacaatgacctcacatacagtgacctcacttaatctatgtgaggctatacacagtggctcatgcctgtaatcccagcactttgggaggctgaggcaggtgattgcttgagcccaggggcttaagaccagcctgggaaacatggtgagaccctgtctctacaaaaaatacaaaaatcagctgggcatggtgaggcgcacctttggtcccaactacttgggatgctgaggcaggaggatcacttgagcccaggaggttgaggcagcagtgagctgtgatcgcaccactgcactccagcctgggtaacagaatgagaccctatctcaaaaaaaagaaaaaagtctatgtggaagacaccacgttaattgtgttgggtggtttagagatgtttctgtctccttcactgatgaccgtgtgtctctgctgctgtcgctcactggtgattatcaactcaacctcttatatttgttttaacaaatatttatacaccctttgtaaatttgcatgagataaagtcattatagttaaaaaaaaattttttttttttgagacagaatcttgctccattgactaggctgagtgcaatgacatcatcatggctcacggcagcctgaacctcctgggctcaattgatcctcctgcctcagcctcctgagtagctgaaactacaggtgcatgccaccatgcccagcttgttttttattttttgtagagacagggtctcactatgttggcaggctggtctctaactcctgggttcaggtgatcctcctgcctcggcctcccaaagtgttaggatttcaggtgtgagccaccatgcctgtcctatgaagtcattacaaagaaataaaattaattggtttcattggcagtattgaatttcaaagcagaaggggtgcttaagagaaataatgcctttggagtaatttctgatgctagatgaaactcatatctcatttaaggtgtccatctgaattttatgtttggatgattgtgaattattccttaaagcttgaagtgaactctggctctctaggataaattaatctttattcctttaatctttattcccttagggatatattaaagggatcaaatttttttttagagtaatgtaaaattaagggacttcttttgttaggtgaatttctcaggttttaagatatcagtatcattgtggacattgactacattgtctactaaattctgtaattttaacttataattctcagtaattggctgggtgcggtggctgacgcctgtaatcctagcactctgggaggccaaggcggcagatcacctgaggtcaggagttggagaccagcctggccaacagggtgaaaccccgtctctactaaaaatacaaaaaaatgagctgggtgtggtggcgggtgcctgtcatcccagctactggggaggctgaggcaggagaattgcttgaacccaagaggtggaggttgcagtgagttgagaatgcgccattgcactccagcctgggtgacaagagtgaaactccatttcaaaaataaataaataaataataaaaataaaaatacaaaaattagctgggtgtggtggcgggtgcctgtaatcccaactactcgggaggctgaggcaggagagtcgcttgaactcgggaggcggaggttgcaatgagccgagatcacgccactgcactccagcctgggctacaagagtgagactctgtctcaaaataataataataataataattcttagtaatttttgcaatttttttggtacctaaaataatttctgttattgtgttggataactttgtcaacttcactttgggaatatctaaatacaggtagctgcattcgagccagaggaatattgggtttttttgttgttgcttatttttgaggcagccttactttgtcacccagactggagtacattggcacaatcatggctcactgcagccttgaccttctgggctcgtgtgatcctcccaacccagcctcccaagtagttgggactaaaggtgtgcaccaccatgcctggctaatttttaaatttttttgtagggatggaattttgctatgtcacctaggctggtttcaaactcctaggctcaagcagtcctcccaccttggcctcccaaagtgctgggattacaggtatgagccaccacacccagttgagaaatactgggttttaatcaagattattgtctgaatattgagtcttaatgacttttttgattttgtttttttggccatagtatgaagtttgctgttgataaccttctgtactaactagaagtagtatagaaactgcaaattaaaaaaaaaaaacccaggtaaaatgttgatggctgctatttttatttaaggtattaataaaggaaaagaagtcagggacattatggaggtcaagttttatattattaaaactcaacttcatgatttatacatacttagaaatagtctgagtgatgtgtgaccaaaatatgatttctaggaggaatgatagttacatccgtggaatagctgcgtacactttattgttcttggtgcttaaactttagttgtcctgctaagataaaggaagacattctttcagttggaaatcatgataatgtatttctccattgaaacagtatggtttgaacagtgctatatattcatactcattattattccttaaatgaatattttaagctcctgatagaaggcaggtactgtgttatatgctgtttgtgttaccagaatacgaagatgaagagaacaaagtattacacaattcctaatctcacataaatgctatttttttttactagctgtggggagcacaaaataagtggttgaaagtcatctgacacagttacatttattcctttccttttccatggctcttaggaataaattgttctactctatggattaaattgccctttgtttattgcctgggatcccaactttatttcctaattttatttctttgaggaaacgtttcacaagttttataacaaagtataactcaatttggagagcacaatctgtgcataagttggaggctacctattgtgaaatggaaaaatgcttgtcctagcattactgagttaatgtatagctggtagaaagttttcacttttaattgctaacttgcctagtgagagtgaaagattgattacggcaactaaaaagtataaaaactactgagtagtttttaggtacagtcagttcttcagtagaacaagaatcttttttttttttttttttgagacagagtctcgctctgtggcccaggctggagtgcagtggcgggatctcggctcactgcaagctccgcctcccgggttcacgccattctcctgcctcagcctcccaagtagctgggactacaggcgcccgccactacgaccggctaattttttgtatttttagtagagacggggtttcaccgttttagccgggatggtctcgatctcctgacctcgtgatccgcctgcctcggcctcccaaagtgctgggattatgggcgtgagccaccgtgcctggcttcactcagtgttttcagttaggaaacttacattgtttagttttgggacattttcttgaattatttcactggttttttttcctctctgttttctcccgtggattccccattgcatagatgctgaattatcttgactggacctccagttttttcttcttgattctgttgccatctctttgattccttattgtttctgataaattttcctaagtttaatttccgagagctctttggaaaagtatcgattttttttcatggatggagtatctactcttttgacacagggtcttgctctgtcgtggctcactacagctttgattgctcaggctcaagcgatcctcctgccctagccctcccagtagctggtactacaggcctgcaccgccaaacctagctaacttttttgatttttagtagacaaggtctcgctgtgttgcccagactggtctcgaactcttaagcgccaagcatttctcttgcctcagcctcctaaaattctgggattacagtgtagtatcttctgtatcctttccatggacgctaatgatggggtataaaattccttttatttatttattttttattgacatcagaaattcctgctaataaaattctttttaaattttaagtttttttcttcccacagttgtccgtgtttcctccaagttccttttctattttttgttttcctttgttttctttttgtggtagatgctttcctcagatgagtggtaatccttggctatttgcagttatgcctctaaaagctgattggaagctcttagtacctcattggtacttgttgactagagttcactctagggtgatctatctgtgtcatttgctggggcacccttcatgtcagcttctgattacttttcccttttctgaaaagggagagaggtcttttaatttcctgtctggtgggaggaggtctgtatgccacttctgtgggagagtgagggaagtagggcagtgaggatttcagtattcagtacatatgtgttttcttaaggcctctgttttcattaagcctcccccgcaccaatgtgctttatgtttccctgctctgaaatcctcctgagggaataatcctctagaattttgccttggtgggaaatgcatagtaacctaaccatgtggtatttaggaaggtactgagagattgagcgtttcctaaggagctttcagccagccttctttatttagtgctcccttcacacctgtttctacaggcgctatctgttaccagttcctgagccttttgaagattccgtggacgaaggttggtttttggctttccatactgctggtttcttggatctgctatgtcagttaccatttatgcatttgctttctagcttttaagttttgtttatgccttaaaaatacctgatgagggccaggcgtggtggctcaggcctgtaatcccagaactttgggaggtcgaggcaggtagactccttgcatctgggagtttgagagaagcctgggcaacatagcaaaacccgtctctactatagaaaaattaacccggtgtggtggtgcacgcctgtggtcccagctacttgggaggctgaggtgggaggatcgcatgagcctgggatgtggaggttgcagcgtgctgagatcatgtcactgtactccatcctgggtgacagaatgagaccctatctcaaaaacaaaaacaaaaaacccccaaaaaccttattagtattttagcacaatttggggaagaaatgaagttaaatatatgtatgttccatcttctctttacccagaacttatttctaatttttttttttgttaagcatcttttttgttgtggtaaaatatacataaaatttattatttataagtatacagttcagtgacattaagtacattcacaatgttttacagccatcactactttctagttctagaacttttctatcacaccaaaaagaaaccccatacccattaagcagtcactccccattccctccctccctcagcccctggaagccacaaatgtgctttttgtttctatggatttgccttttgtggatatttcatataaatgaagtcattcagtatgtggccttttgtcacatgttttcatttaccataatatttttgtggttcatctatggtatagcatagatcactgcttccttcttttttatggctgaataattttcattgtgtggatatatcacattttgtttatctgttcatcagttgatgaacttttgggttgtttctgctttttctggctattgtaaatagtgctgttatgaacactgatgtacaattttttggggtgaacatttgtttttattcttttaggtatatagctcggtgtggaattgctggatcatatatggtaattctgtctttaacttaatgaggaactgccaatctgttttcctcagtgactgtaccattttatattcctattagcaataaacaagtgtcccaatttctccacatttttgccaacactgttttccattaaaaactttttattatagtcattctagtgggtgtaaagtggtatctttttgttttgatttgcatttccccagtaactaatgacattgagccttttttcatgtgcttgttggccatttgtatatattctttggagaaatgtctgtttaagtcctttgcccactttaaattgtgttgtctttgtgttgtagagttgtaagagttctttatacattctgggtactagacatgattttcaaatttagatacatgattttcaaatcttttgcctctagatgttttttacttttttatttttgatccttgaactcatctatattctatggttgtgatgtaatgatgacagaattggtgtcatttgtgtttatttaccaggttatttggaaggattatattttaggtgctctcctctcccccagtaaatggtattacgacacaagggttataaaggactgataagaaattacttaagacagaaagggaagttggcctgcttccaaaatgtggtcccagcagaagtgaagttagttacaccaataactacagtcaaaaagctatttttaaccatgataatgtacttgttgttattaatattaaagattatatttttccaggtgcagtggctcacatctataatcccagcactttgggaggctcaggcggatggatcacttgagctcaggagtttgagaccagccagggcaacatggtgaaaccccatctctacaaaaaatgaaaaattaaccgggcttggtggtgcgtgcctgtagtcctagctacttgagagtctgaggtgggaggatagcttgagcccaggaggtcaaggctgtggtgagccaagatcgtagcactgcactccagcctgggcaacaggacaagaccctgtctcaaaaacaaaacaaaacaaaacaaaacaaaacaaaacaaaacaaaaccgactatatttctgcattaagtgggggtatggaatcctatctaatatttgagataataattgttatagtattttattgagcttttattgggtaccagatgtgttctaagtttttttcgtgaattattttcattaatcttattcattgttgtgtcctgaatgagtactcacatatttgttgaagggctcaatggtccctaaaaccttagatgctgttttggaaggttaacttgccaaaggtcacatagttggcaaatgatgaagctgagattaacattaagatctgattccaaagtagtctttcttaactgtattgctttatgtggagttttgccattgatgtctagacagaaaatctctagcaatggaaaaaaataatttttaattaattttaatttttttagtgttttgcttcttttttttttattttgtgagccaccgtgcccaattggtttcttttaaaagactagttagcttgtgctttaggcctcttgattaatctgaggtatttaattaatatctttgaaatcctaagatttactgtatcacttctgcaatatctaaatttttccttcttacttatttctgttctccttctacagtcctttctattatgtttaatcatcaaaacgttgttcttgttttctattgcaatctaatttttagtgttatgctgtttccagatgccatttgggtcattttcaaaaaaagatgagtaataattagcaagtaatgaatattgttctttttaccattcattaagaacaattgttaattgtcttattctattgtgaagaatatctgtaattcctgcttagaacctgggttgatagcaggatatcaggaagcactaagtgtacacagaacgatatagctggaaaaagtatatatgttaaagaataatatgttgtctaaggacagaatggaactgatcacacaggttcttttttggtaagcttcaaaacttcttatctcccatgaaagtactttttcttttataatatgcaacaataactttctgtttagttaattagttttaaaacaagcttaaacttataatttataaagaatcatatttgctccctatcattgttttatagctggggctatactgacaaataagaaaaataaaattcctgcccttgtggaggagacagttaaaaaatgagacaaatacatttcagatggaaatgaggacaatggaagaagagtagagcaggatgaaggcatgaagggtgactgagatctggtcaatctttagatagtgtaatacgggaaactgctttgaaaagatgacttttgagcagagatcttaacgtactgagggagtgaaccattcgaggtctggggaaagaattcagcttcctcttcagatgtacaaaattacaagatattgccattcttgtaactgaaaacctataaaagcaggataagaagtacggtttctaaaaacccatcgaagagctgaggatacaagggagcctaaatgaaccaactccagaaagtaatcaaactttcatagtggagaagaaacccatggttgctctaggatggaacaaccaaaggaataggaatccaccatagatgaggggaaaggagaaaccagccacatttttttaaaatcagatttttaatggccacgtatgggctggtttgacaggttaggatcctaagaagccctagcaactctggcaccaaagagcaagtatgcacccacactccagctcctacccacagatgttcactgaatgttcaggagtagtaagccaaaagcctgggccagtgatgaactggcatagataatacctgaggcatttggaacctctcccaagtatagggcaaccacccttagaaggcaggattgctgagaaaaatccagcagaggctctccaggctttcagttctggaatgctgcaggcaggggaagagctagagataactctcaccccacactctggcagtccatgttttcagccaccaaggactggggacagggcagaagaggtgagtgaaactgctctaattcatttcaggccttcacagaatgtaaggaagctgccctccagaaggctggctggggaggaggagcagggctgcacgagggcacctgagcttcagaaagcaaggtgtgcgactggagagcaaggagaatctagcaaaccaaactctgaccgtcgcgcttaatgcagagatagagttcctacagttttttttttctttcttttttaaaatataaacttgaatttttgaaacagtttcagatttaaagaaaaattgccaagatagtatggagagttcccataaatgctgcctctagtttttcctatttttatttaatttatttatttttttagtttttcctatttttaacaccttatattagtatggtatatttgttataattaatgaactaatactgatatattttcattaactaaagtccatactttatttacctaatgttttgggatcccatttagctgtcacgtctccttagggtcctcttggttttggcattttcttagacttgagcttctcatctcttgtttttgatgactgacagttttgaggagtattgttcaggtattttgtagaatgtccttctattgatatctgtttggtatttttgtcattgttacagtgaggttttgtatttttgggacgaagaacatgcaggtgaagtacaatttgctttcctttttttgagacagtgtctcactctgtcacccaggctggagtgcagtggtatgatgacagctcactgcagccttgaactcctgggctcacatgatcctccctccttagcttcctgagtagctgggactacagatgcatgccaccacacctggctaattttttttttttttttaatagagacagagtctcactgtattgcctaggctggtcttgaactcctaggctcatgcaatcctcccacttcagcctcccaagtagttgggactacagacatgtgccactatgcttggcagtaccattttcatcacatcatattaaggggacatactgtcaatatgactaatcagtgttgatattgaccttgatcatctggttgaggtagtgtttgtgtatttctttactacaaagttactcttttttctcctctgtttacatactgtactctttggaaggaagttacatatgcgcagcctacacttaaggcatggggagttatgatacccctcctcaagggcaaagtgtctatataaattatttagatttcttctgcatggaagatttgtctcttcttcctcatttatttatccattcaattttttaaatattagtatggacttatggatattttataccttgggttaaaatcttattattgctttatttattttattgttcaagttgttccagctttggccactgggagctctttcagttggtatgactttttgatataccactgtcagtgtatgtgtgtgtatgtctgtttgcactttctcactttctggcactacaagatgctctagtatatttagagactaaagcatgtagtatatgctttagtatatgctttatctagtatatttttctgtctcaatcctagaattagccatttctccatggagccttggttccttttactggagaatggagaaaccaagatctaggtgctaggtgtacatgttgctactggggtgtttttgcttgtaggccatctcagctgacagagccagaaaatgtatgtatttatactaccctgtatatatccacatatctataaatatttctatatgtatccatccgtatctaattaagctaaacatgagtttatattgatgtattaggttccagttgaatcactacatggatgattctaacttcctgcccttgcttatctgaaaactcctgctccaatagtgagaaatctgtctcctaccatcagccacccatttacttaatcattctactctagtatacatgtaaggtactcccacagttttaaaaactggtggcttggctatgaaacacaagcaggtctctgtaattttacctaggctcagatcccagacctgctcaagtgaaaggcttgatctcagtccttaaatatttgaagccagtgattaactgttaaattaaagctgcatcatagcccacacccagctcagttacatattggattgactcagactcccttctagtgtcctaacagaaaaattgtcatgtctttttctggaagtaaaatattacttaatttaataagtaatctatttttatataaaatgtctggtgtgtaatgaaaagttacaaggcacaagaaaagcaagaaaatgtgaccaaaggtcaagagaagaaatagtcagagatgatccagatttatcagaattatcagacagggatttaaagataattatgaaaaaaatgctagatgattgaatgataaaggttaacgatatgcttgaaaagatggggatttctgtagagtcatggaaattatgccaaagaaccaagttgaaattctattaaatagaggtgaaaaatatactagcagagaccagggaaaacaaaaaaaggaaagaaaagaaaaggaaagggaagggaggggagggaagggagaaagaaaaatacactagcagaaatgaattcattacatgggcttaacagtttatggacatagcagaagaaagaatcagtgaatatgaagacagattggaaagagaaaagacagaaaaagtcagggaggggtagaaaagagattttagatctgtgggataatatcagatggtctaacatatatgtaattggagtttcagaaggagagaagagaacgtggcagaagacatatttgaagaggcaatgctcaggaacttctaaaattgatgaggtcatcaattcacaaatggaggaagttcagcaaatcccaagcaagttaaatacaaaacaaaaataagccaacaaatttaaaaatcccatatataggcatatcataatcaaactgctgaaaactgaagatggaagagatcttaaaagcaacaggagagcaacaggagaataaaagacacattagttatgtgagaatggcaacatgggttatggctattccatgttttagggccagaaaaaaatggagtcttagctgagcatggtggcacatgcttgaacccaggagttcgagtccagcctgggtaaagtagtgagaccccatctctatttaaaaaagaaaagaagtccaggcacggtggctcacacctgtaatctcagaactttgggaggtgggcagatcacaaggtcaagaggtcgagaccatcctggccaacatggtgaaactgcgtctctactaaaaatacaaaaattagccgggtgtggtggtgcacacctgtagtcccagctactcgggaggctgaggcaggagaatcacttgaacccaggaggtggaggttgcagtgagccgagatcatgtgccactgcactccagcctgtcgacagagcgagactcagtctcaaaaacaaagaaagaaaagaaaagaaaaaatagaatgttaaatacaatgggatgacatccataaagagctgaaagaaaaaaaaaaaacaacctgttaacctagatttctatggccagcagaaatagccttcaaaaataatggcaaaataaagactttttggacatatcaaaaagggaaagaatttgtttccagcagacctggactcaaaaaacattaaaacatacacattaacaagatgtgggttttacagcatatatgtgattatacaaccatgaaagaacaaaaaggaggagatggaattatactgtcacacatttcttactctgtgaaaggagactgtagtaacttctggatgcatatgtaatctctagaacaagcactaaaaacacaaacagggataccataaagtcagtacatctgcccaagagggattaactgctacgagaatcattctcctactgtaaacagctagaaaacaggacaaaaatacatgaaacaactgttttcagacattggacaacaggcagcacaggatagtgatccctgagagaagggaaataactgatatgaaccctacaggggttcctataggcagtttccagattgtagcacagagtaggggaatccaaatagagcccaggagagtttggagaagtcaaggcaactagaatttgtggggcagaaaacaagaataaaaggaactacacagaaatctatagaagtaagagaatctttgattggacactcatctgcacatgtgaagtgtggaagtcagcaatgctggagaaagtcacactggaaatcagaacactgaacaattccaggagctcacacagagctgggaatagtttatgtttccattaggcatagtggagagactgtttcatacaaaggacattggctagagtcttcaaagtggggttaaattagctatagactaaaggcctttctaaacctaccctaagcttcaaggcaggttttgaaaggaccaggctgattctaagtaactcaattatgtgccaaaactaaactcttttaaagaatacagtaaatgccagcacctaacaattaaaatgttcagcattaataatatattaatgaaagattactaggcatacaaataaaaagcaggaaaatgacccataaccaggagaaaaatcaatagaaaagagacctagaaatgtggaattattagaaataattctgatgattgaattatcagccaaatatgttaatacaagtattataatgactagtagagaaatgaatgatagataaaaagacacaagccagatgtggtgaatcatgcctacagacttgagggtaggcagatcagcttgcccaacatggcaaaaccctgtctctactaaaaatacaaaaattagctgggtgtggtgggatgtgcctgtaattccagcttgggaggctgaggcacgagaattgcttgaacctgggaggcagaggttgcagtgagctgagaacatgccactgtactccaacctgggtgacggagtgagactttgtcgcaaaaaaaaccaaaagactcacaagtagtatctaaagatgaaaaataccagatataatatccaaaactgggggaaaaactggatgtgattaacagcagattagacactgcggaaaaaaagatcattaaatgtgaaggtatagcagtagaacctattcacactgaagcacaaagagaaaaaaaatactagaacaaagttaatagaacatcagtaaccttgggacaatagcaagttgcctaatacatgtataattggagttccagaaaagtggggaaaggtagaaggcaattactttaggaaacagcgtctgggtggccaggtgggtggctcacacttgtaatcctagcactttggggggccgaggggggtgcagatcatttgagatcaggagtttgagaccagcctgtccaacatggtgaaatctcttctctactaaaaatacaaaaattagctgggcttggtggcatgcgactgtaatctcagcttcttgggaggctgaagcatgagaattgcttgagccagggagatgtaggttgcagtaagccaagatcatgccactacactacagcctgggcaacagagtgagaacctatctcaaaaaaaaaaaaaaaaagaaaaagaaaaagaaaaagaaaataagaaaatagtggctcatcatggtggctcatgcctgtaatcccagcactttgagaggctgagatgagaggattttttgagcacaggagttcaagaccagcctgggcaatttccttaaaaaagaaaaagaaacagtgactataaattttccaaatctgatgataaccataaactctcagatccaagaaactcagtgaactctaaatagaataaacaaatataatcatacctaggtatgtaatgataaaattagtgccagtcatggtggctcatgcctgtaatcctaacactttgggatgctgaggcccggagtttgagaccagcctgggcaacatagtgatacccctatgtctacaaagattaaaaaatagaaatataaaaagttagctaggcatggtggcacttgtctgtaatcccacttacttgggaggctgaggtgggaggattgcttgaactcacgaggtcaaggctgcggtaagccataattgtattccacccagggtgataaagcatgacgggagatcctgtctcaaaacaaaacaaaaccaaaaaaaggcgaggcacagtgactcacacttgtaatcccagcattttgggaggtcaaggtaggatgatcgcttgagcccagaaattggagacaagcctgggcaacatagtgagaccctgtctctcaaaagaaagtttaaaaaggcgggcatggtggcatgggcctgtagtcctgtctactcaggtggctaaggtgggaggattgcttgagcttgggaggttgaggctgcagtgaactgtgttcgtgccactgcactccagcatgggagacagagcaagatcctttgtcaataataacacataaaccaatgttacaatgagaagaaataaattctggtgttcggttttttgttttttttttttctgagatggagtttctctcttgttgcccacgctggagtgcaatggcatagtcttggctcactgcaacctccacctcctggattcaagatgattcttttccctcagcctcccaagtagctgggattacaggtgcatgccaccacacccagctaattttcgtatttttagtccatcacgttagccaggctggtctcaaactcctgatctcaaattctggtgttctattgcacagtggggtgagtatagttaagagtaaaatattattacaaaatagctggaagaggggcttttgaatgttctttcacaagtgagaaatgcaggaggtgatggatacactaactgctctgattggatcattatgcaacatggatatgtatcaaaacatcaaattgtggcccggcgcggtggctcatgctggtaattccagcactttgggagtctgcggtgggtggatcacctgaggtcaggagttcaagactagcctggccaacatggcgaaaccccatctctactaaaaatacaaaaattagctgggtgtggtggtgcatgcctgtaattccagctactcgggagactgaggcgggagaattgcttgaacctgggaggcagaggttgcagtgagctgagattgcgccatcgcactccagcctgggcaacaaagcaagactccatctcaaaaaaaaaaaaatcaaattgtaccccataagtatgtacaattacaatatgacagtttaaaaattaaattaaaaaaaaattctcttgtacttaccagctgaataaaaaataaatttttaaaaggagagaagtcttcttaaaaaccagttatttaccccatcattaagttataatgaactttcttatgggaattctttgataaggaagctcctttatgctgaagttttattcttttcatacctctttagataaatcagtgctttaggagcatatgtcatatgactcaatggcagtgttctaacttggattctagctccacattgtgcaaaggcaaaaaaccagagagtcagtgtggtagttaagaacttatgttctgctgtttgatttcctacatgccagtactccctccactacctgcagtcttcctgacctggggcaagttccttttgtaaactctgttttctagggggatggtggtggaagaaggatggtgatttgagccaggcagtagcaggtagaggtggagaaaagtggtcaaaccctgaatgaacgttaaagataggaccaaaaggatttgatgagaaattggaagtagagcacagggaaaaagaaagatatcagtgatgatgccaaggtttttggcctggggaattgggatagtggagttgttatttgctgagtatgacttttcacaaaggaatgtcaaggcataagtagcaaagttcttttttttttttttttaatttttcttgattgtgtttgttttgtttttcatcttttgtgggaggtgggtggagatgaaagcaagcacaggggttggcaggcatacccctggcacctacctgtgagttcatgattactagttttaaagttcagtcctttttatttttacttttttttttttttttttttttttagagacagtgtctcactctgtcatccaggctggagtgcagtggcacaatcacggcttactgtagccttgatctcccaggctcaggtgatcctttcacttcagcctcctgagtagctgggactacaggcacataccaccctacccagcaatttttttaaaaaattttttgtagcgacatagtcttaccatgttgcctagactggtctcgaactactgagctgaagcaacctgtctgcctcagcctcccaaagtaaagtactgtaattacaagcttgagccaccgtgcgtggccaaattctggccttttgatgttgcatggtgtggatggggaggcaaagtgtgatattttaggaatttgaggatttcttcttcgaccttaggcgtgacattggacaaatgacatctgggctgagacattttctagtaatgctggatccaaaaaactcttatcccattgtctcatagcttcattacacagacctggcggccatgatcctctttttttcccccttagttgccaaacatgggttctctgtcttacctcatttgagtcttacctcagtcttgagagtctcaaatgtgtatcatagtttttagacaaaattcaaccttatttcaattagtatttcattgttatttaaatattttaacaggaaaactgagcaatgtttccctttacctgttaatcctgttataatattttagataaagtgtattagaaggcacattcttcattaatagaatatttattcatgtgtttatatggttcttaactaggaataccatatagtctatctccaaccctttgagaaggaaaaaagatcctgactaaacaggacaccagaagggcatgcctaaactaggactgttctgggcaaatcagaaggcatgttcaccttattctttttattctttctttttctttttttttttttttttgtgacggagtctcgctctgtcgcccaggctggagtacagtgacacgatcttggctcactgcaacctccacctcccaggttcaagcgattctcctgcctcagcctcctgagtagctgggactacaggcacatgccaccatgcctggcaaattttttgtgtttttagtagagacgggggttttgtcgtgttagccaggatggtcttgaactcctgacctcatgacctgtccacttcggcctcccaaagtggtgggattataggcatgacccactgcacctggcctcaccctattcctaaggccagaaaaccagctagagtaaagttcactttctgtttgagtgcttggactttattgggagaaggcaaatgccctggaacaagagtgaaagggagaaattcccgttgtattgcaagccagaataagagaggctcacccacactggcctaaggcatctcagttgttgatgagaatgtgattacagatgtctcacatgaataccaaagacaattgcaaaggaaattaaaagttatgcaaagagagtcgagaagtcagttgtctgctcacaggttggctttagtggctattactttgagatactaaatgagcgatagctttaaacttcaactgcttttgtttctgaggaaaaaaatcatcttatatcctttcataagtcgcataaaaagtggacattttctattattttaaagagtaaatttaggtacaagcatttactaatttttttttttttttttttttttttttgagatggagtctggctttgttgcccaggctggaatgcagtggcgcaatcttggctcactgcaagctccgcctccctggttcacgccatgctcctgcctcagcctccagagtagctgggactacaggcgcccgccaccacgcccagctaattttttgtatttttagtagagacggggtttcacccttttagccaggatggtctcgatctcctgacttcgtgatctgcccgcctcagcctcccaaagtgctgggattgattacaggcgtgagccactgctcccggcctgtaattctttttttttttgagacggagcctcgctctgttgcccaggctggagtgcagtggcgtgatcttggttcactgcaagctccgcctcccgggttcacgccattcttctgcctcagcctcccgagtagctgggactacaggggcccaccaccacgctcggctaattttttgtattttttagtggagacggggtttcaccgtgttagtcaggatggcctcgatctcctgacctcgtgatccgcccgcctcagcctcccaacatttagtaattcttaaaagagttcagcatgaatatacacagtacgtgggttattagtactgtgttgttaacacaaatgaactatgatagcaaattgaatttggttcaatcaggtcaaagaataaaaggatgattttctttaaccaccagcaaaggatagtataatgaaccccatgcaactatcacttaacttcaataatttcaagtttgagtaagttgcagagtagtaatttgaacccacatctctcttgttccaaatcccttgcttttaattacaatcccatgtggcttctttgtcatttgatgctattgagcaactttatgatttttttggtgtttttggtaaaatagacatgaaaaggcattactacagggagttttttcactccctggtaataagaggggaaaagcactctcttttaatgatacatgttttgtaataagcattttttttagttgcagtgttctgcaaagacaaaacctgctgatacagttcatcctgttttagaaatctttgacccattcatcagactctgaccactctaaagataaaggattatggttgtattggtttttccgactgaagcggccttctgcagattgagaaattgtataattattaactgcggtaatggagatgtacttgcaagtttcatctggtatcttaatgacctttaaccctctgagtacacctaaaacatatcctagaattattgaaattaatcagttgtccataacttttctgtctgtataatttggctatcatacgtattttgtttccccctgcccttgccagtttccatcctcctactcacatactcacaactcctataaattggagtatttagtagcagtagcctttggtataaacactttttaaaaatttactattttttgaattaatagggccactttctagtcaagtttttttttttttggggggggggtaaggagggtagggtaacagttccacacttacaagggtatttgtttagaccaagcttgttcaacccacagcctgtggggctgcatgtggtccaggatggctttaaatgcaactcaacatgagtttgtaaactttcttaaaacattatgagttttttttgagaatttttttgagacagagtctcgctctgttgtccaggctggagtgcagtggcccgatcttggctcactgcaacctccacctcctgggttcaagcgattctcctgcctcagcctctggcgtagctgggattacaggtgtgtgccaccactccaagctaatttttgtatttttagtagagacggggttttaccatgttggccaggctggtctcaaactcctgacctcaagtgatctgcccacctcggcctcccaaagtgctgggattataagcatgagccaccgcgcccagcctgcgatttttttttttaagctcattagctatcattagtgttaactgtattttatgtgtggcccaagacaattctccttcttccgttgtggcccagggaagccaaaagattagacacccctgatttagacaaataagtgaaggcacactgaaataacagttatatataataaccttgtgccacccagcgcggtggctcatgcctctaatctcagcactttgggaggctgaggcgggcggatcagctgaggttgggagttcaagaccagcctgacttacatggagaaaccccatctctactaaaaatacaaaattagctgggcatggtggtgcatgcctgtaatctcagctacttgggaggctgaggcaggagaatcgcttgaacccaggaggcagaggttgcagtgagctgagatcgcgccattgcactccagcctgggtgacaaaagcgagactctgtctcaaaaaaaaaaaaaagaaaagaaaagaaaaaaaaaacacaaaaaaaccttgtgttttgtggatctcacattcatctcagatatttcttgccctgggagatcctctgaattctcaggactgcttcgtgtcatccctttatgctctactatcttcccttgcctagaaggcaagtagggctttgaatctcgcctttgattctactgtgatcctatcaaatatagtaatgctagaaatataggtctgaagtttgggagagagattggctcagtatagatatgtaaagcacagctggatatgtagtagttatatgaatgggattggatgaaattctctagaggtgtgtggaatggaaagaggtggcccaaggaggaagagagagagagagaaattggagaggtagaacaatttaggaaagagtaatgttctagaaactaaggagagagtttcacaactgcagtggtgaagcactgtgagttcttatttggcaatttggacttcattattgtcttatcacagataggaaatgaaaggttgcagaacatttaggagaaaatattaagtgaggacacagaagcagtaaatgtcgtatatgccttttaaacattttggagattacccatagtaggcctgtcccttgggtaaggcaattagggcagctttcctgggccctattttggggtggggaatgactcggggactttattatatgactttttttctgaacattaataaaattcagttccaaaattttgtgattaactgtagtcctaagagcctatgaaaaatgcagataatgggcagttccacattggttgaactgccccaggcttctctcttctagagatgctgtcccttccttttaatcctgtagtagctcctatcacttttttttttttttttttttttttgagacagagtcacccagactggagtgcagtggtgtgatctcagctcactgtaacttctgcctcctgggttcaagcgattctcatgcctcagcctcctgagtagctgggattacaggtgcgtgccaccacacctggctaattttcgtatttttatgggattttaccatgttgcctaggctagtcttgaactcctgacctcaggtgatccacctgcctcagccgctgaagtcctgggattacaggcgtgagccaaggctcctggcctcctgtcactttttacaattgtcagtttgtttttcctctcagaaattaagctccttaaagctctctattattgttttgaattcccagggcctagcataatgcccagcacgtaatgttgagtgtttgttatgtgagtgattgaaggaataatccaatacatatctgtcttaagtacaaaagaattccaatatggtggtctcacagagtcaaaaaagcggaatgtttcagaaaagagggattgataaacagtttcaaatggtactaaaagtattgaaaactgacctttggatttggcttctagaaggtcattggtttccatagtgaaaacttttatagcaaaatggttggagtagaagtggttgaagattaaaggagaaatgagatgtaagaaacaacaaacaagtttgtgggggcgggggggttggttttatttttaaagacttgtagctgagcgtgacagtatgtatctgtagtcccagctatttgggaggctgtggctggatgatagcttgagcccagcagcttgaggctgcagtgagccatgattgcaccattgcactccagcctgggtgagagagagagaccctaactcaaaaaataaaataaaataaaataaaataaaataaaataaaataaagatttgaagctaaagggaagaaaccattggagaagaaagccaaagatctgatggaggagaattcattatcatggtaatgttatgcatttgatttgcatatatctaagtattcccaccaacatgttttttttttttttttgagacagagtctcactctgtcacccaggctggagtgctggagtgcagtggcacgatcttggctcactgcaacctcccgggttcaagcgattctcctgcctcagcctccctagtagctgagactacaggctggtgccatcacgccctggtaatttttgtgtttttagtagagatgaagtttcgccatgttggccaggctggtctcggactcctgatctcaggtgatcctcccacttcggcctctcaaagtgctgggattacaggcgtgagccaccacgcctggtcccaaccaacatttcaagataatatatttctccttccacttgggtttgatatattaatgtattttgaacttgaaggcttttgctgtgctatttggggcccctagtggtaaatctaataatgacatgcaatagaacagctaatataccagttattccttatgaaggttattctttctatgaggattaaatgaggttggaatatgtagttatagcaatagtagtgattcttaatcatttttttaaaaagagagtctcgccaggcacgttggctcacacctgtaatcccaaaactttgggaggccaaggtgggtggatcacttgaggtcaggagtttgcgaccagcctggccaacatggtgacaccccatctctactaaaaaaaactaaaattagctgggcgtggtggtagacggctgtaatctcagctactcggtaggttgagaattgcttgaacctgggagacaggaggttgtagtgagctgagatcgcgtcattgcactccagactgggtgacaagagcaaaactctgtctcaaaataaataaataaagggtctcactttgttactcagactgaagtgcagtggtgtgatcatggctcactgcaatgtccgcctctcaggctcaagtaatcctcccacctcagcctccctagtagctgggactataggtgttccaccactatgtccagctaattttaagaaattttttagtttttaaatttttttgtagagatggtggtcttactatgttgtccaagctggcctcaaactcctggtctcaagtgatcctcccacctcggcctcccaaagtgctgggattaccggtgtgagccaccatggctggccaaaaatgagtaatttttttttttttgagatggagtctctctttgtcgcccaggctggagtgcagtggcgaggtcttggctcactgcaacctcctcctcctgggttcaagcgcttctcttgcctcagactcccgagtaactgagactataggcacgggccatcacagccggctaatttttgtatttttagtagagatggggttttgccatcttggcctggctggtcttgaactcctgacctcaagtgatccacccccttggcctcccaaagtgctgcgattacaggcgtgaaccactgtgctctgccccaaaatgactaatttaaaggtgactgtaatatagttaaacaaatgcctcttttcccattctttactaacttgttatttaaatggggcaagtttttacaacataagaaacaggccaggcgcggtggctcacgcctgtaatcccagcactttgaaaggcagaggcgagtggatttcttgaggtcaggagtttgagaccagcctggccgacatggtgaaaccccgtctctactaaaagtacaaaaattagccgggcatggtggcacagactgtaatcccagctaatcagggggctgaagcaggagaattggttgaacctgggaggtggacgttgcagtgagcctagatggcaacactgcagtccagcctgggcaacagagcaagactccatctcaaatgaaacaaacatactaaaaacctattaacttgtttgatgtgagtgtgcttagctttatttcccttaaagagagtctttttatgagatggagtctcactctgttgcccaggctagagtgcagtggtgcaatctaggctcactgcaacctccgcctcctgggttcaagcgagtcttctgcctcagccttcaagtggctgggactacaggcgtgtgctaccacgtccagctaattttttgtttttagtatagacggcgtttcacgctgttaggcaggatggtctcgatctcctgacctcgtgatccacccacctcggcctcccaaagagctgggattacaggtgtgagccactgcgcccggcctaaagagagtctttaggtgaaaaatttttgtgaatattgtgatttctccttaataatttcttgtgtatttatgaattttatataattaaatggcatatcaaaaaaatcacctatgttaattatgtttttgactcagttatattttcttttggtacattattaagttaatatccatatgcaaaaatatgctgacaatatattaattttggatttttcatttttatcagaaatcatgagtggaggatctcaagtccacattttttggggtgctccagttgcttcactgaaaatgacagtatcagaagacacagcttctttaatgtctgttgctgacccctggaaaaaaattcagcttttatacagtcaacattctttatatctgaaggatgaaaaacagcacaaaaatcttgaaaactatgaagtcccagattctattggttctccagatctttgtggtcatttcttagcaaactgtatgaatagacatgttcatgtgaaagatgactttgtacattctgtttctgaaacacagaatatagaatcccagaagattcactcctctagactgagtgacataactagctctaatatgcaaatatgtggatttaaaagcacagttccgcatttaaccgaagaagaaaagtatcaaagcttctcagtgaaaataaaattagagatgaacagcctaaacatcagccagatatatgtggtcagaactttaacacaaatttgtttcagttgggccataaatgtgcagctgtgttggatttggtttgtagtactgaaaaaattaatatagggcctgaagtggtacaaagagagtgtgtgccaacagaatatcatgaaatacaaaaccagtgtttgggattattttcctcgaactcagtagataagtcaaggtctgaagcagcagttaagaaggtctcagaccttaaaatatcaactgataaagaatttctcagtataattacctccagccaggttgctttttttagctcaaaagaaagataaaaggcggagtcctgtaaataaagggaatgtaaacatggagactgaaccaaaggcaagttacggggagataagaatacctgaagagaattcgattcagcttgatggttttacagaagcatatgaaagtggacaaaaccaagcatattcccttgaactttttagtcctgtttgtcctaaaacagaaaatagccgcattcacataaactctgataaaggtcttgaagaacatacaggatctcaagaacttttcagttctgaagatgaactgccaccaaatgagatacatattgagttgtgtagctcaggaatactgtgttcccaactaaataccttccacaaaagtgctattaaaagaagctgtacctctgaagataaagtgggccagtctgaagctctatctggagtccttcaagtagctaagaaaatgaagttgatttctaatggaggagattctgctgtagaaatggatcggagaaatgtgtctgaatttaagagtattaaaaaaacatcattaataaaaaactgtgattctaaaagccagaagtataattgtttagtcatggtgctatctccatgccatgtgaaggaaataaacaaaattcggaccaaattctggctctaaagtgcctttagcaacagttacagtaagtgatcaatcagaaactaagaagaaggtttttctgtggaggactgcagcattttgggcatttacagtgtttcttggagatataattttactcacgggtgaggtcattatggtatagtggtagcttattttataaagctaagttttgtttgtttttgtttttctcccacttagtctttgaagactctttctttagtcatttgcctcttctgagctcagcataattgatccctttattgcatctgcattgctctcctttccattgtccactctcctgcccattgccacttctgggcctctgttctatccttctcagctctgccccttctttccacttatcccctcctttaataagccttccctagtcaggtggagtgggtcacacttgtaatcccagcactttgggaggctgaggcaggaagattgcttgaggccaggaatttgagaccagccttggcaacacagaacccgtctctacaaaaaataaattaagttttgcgtgcctgtagtcccagatacccaggaggctgacatgagaggattgcttgagcccaggaggttgaggctgcagtgagctttgattgggccactgcactctagcccgagcaacagagttagacctttctgcttctttacctaatgtctaataatgctgtgcacattgtgtttttactgtgggaacagttattgatttctgttgccttattttattatcaaaattatattaattacacttggaaatatggaaaggaaaaaactggtattataccaacttcatataaccaccaatagagttcgagagtgttgccttccagttattttctctgttctccttaaaatgtgtgtgcatgtgtgtatatatcacacatagaagctcatatttattgggagcttagtttgtgagaccctgttttagattttacatgcatatttcattacaacaagtatatgaggaaggtactgatttttatccccacttttcagttgaggaagctgaagcccagagaagtaaagtaacttgtccaatgtcatacatctaggaagtggcaaagctatagtttctcctagactccagaatttatactcttactatatagttgtaaccataaagaacattttgtttttttaatttttaatttatttatttttaagagacagagtcttgctatgttgccaagtgcagtgggtactcacgggcacaatcccattactgatcagcatgagaatttttgaattgttatttttaattttttgtttgtttgtttaataaggacaggatctcactgcattacccagtctgatctccaactcctgggctcaattgatcctcctgccgcagcctcccaaagtgctaggattacaggcgtgagctaccgtgcccatggtatttttaacatgcccttgtttccaacctggaccagttcacccctccttagggaacctgtggtcctccactcccaggaggtcactatattgatggcaagcttagtgcaaacacctgatcggctacaactctgaactcctgggctcaagtgagcctcctgcctcagtctcccaagtagccaggactacaggcacgcatgccgctgcacccagagagaatatttaatttttttttttttttttgagacagtcttgctctgtcacccaggctggagcgcagtggcacaatcttgactcactgcaacctccgcctcctgggtgcaggtgattctcctgcctcagcctttcgagtagctgagattacaggtgcaagccaccatgcctggctaatttttgtatttttatagagacggggtttcaccatgttggccgggctggtttcgaactcctgtcctcaggtgatccgcccacctcgccctcccaaaatgctaggattacaagtgtgagccaccgtgcctggccagaatatgttttcatcgaacacatctaacattgtgttacgtgttctttgttgatttaaaattgacacatggtgtattagagcaggaggaagttgattaagcttaataaaatatctaaagaaagaatgtgatacagaggcggtatttagaaaaagaaaacttcgaagcaatattgatagtcctaccaaatagtttacaggaggaatgagaaccttagctaatgtacttggtgttcctgtaggattgtcaagtacaatctttttttttttttttttgagacggagtctggctctggcacccaggctggagtgcagtggcgcgatgtctgctcactgcaagctccgcctcccgggttcacgccgttttcctgcctcagcctcccgaatagctgggactacaggcgcctgccaccgcgcgcggctaatttttttgtacttttagtagagacagggtttcactgtgttagccaggatggtctcgatatcctcacctcgtgatctgcccgcctcggcctcccaaagtgctgggattacaggcgtgagccaccgcgcccggccgagtacaatcttttataaagaagtaaacacaaaattgtaatgaacaggcttagcatagccacatcccactggcagtattagctaatattatttatatgtgattatattattggaggttcaattcacctaactccctctgttctgattcagtgcttgctgaatacctctttgcttgtgatttggctttctagttgtagagctgcccacagcatgagaacaggctgaaatactgtttttttggggcaattattgtaaatgaaaaaaaaatgtttttttttctttaatttgtttcattaattgatttagtatgagcttatgttgcagagctgaaatctagttttggagtgttaacaaaattaagtttcccagactgtaaaagagggctggatcctggaccatggtcattttaccgaggcaattaatgtcagcagggacctctcaggggccttttcctttttcctaggtaggtgtaaactcaactctgcaatctctgtattttttcctaacatctctatagttgttaacgactaggtaacattctctctggtggctgtaatgcaatttacttaaccattttcctattataagacatttagatgatttctatgaacatttttttaaaaaatcagattttttttgtctttttaagaaaaagaggatctagttcaccgatttctgaataagtttcttttgtgtggaacagatggaaatgttgggaaaaaaaagaaatctacacttttctgttgtcctaatgaggcagtgaacttagttggatagcttgggtagtttatactacctattgatatatacccccaaacagaaatcttcctttttttttttttttttttgagatggagtcttgctctgttgcccaggctggagtgcagtggcgtgatctcggctcactgcaacctctgcctcctgggttcaagtgattctcctgcctcagcctcccaagtagctgggactacaggagcccgccaccacgcctgactaatttttgtatttttagtagaggcagggtttcaccatattggccgggctggtctcgaactcctgaccttgtgatctgcccacctcggcctcccaaagttctgggattacaggtgtgagccagcgcgctcggcccatactgaaaaatttgaagtaacagatgtattccagaccttgttgaataccaacacagtagacagtttgctattataacttctagcaatagaatgaagagatgccaaaaataaggattacctaagggagactactgactagaattagaagaagatgggaggcttaacattgggaaaccacagtgtttaaaggacaaacagaataaggactaggagctggggcatgtcagtgagagggtaggaaggagccaggaggccagggtgggctacccatcccctccatgcaccactagtgattaccatgtcactaatccaacataggcttcacagtcctagctttcagaatgctctccttgaaatttcttgtctgttccttttttctgaagaacatgcatcctgaatgttggatcatgaaaagtcttgaatgctgtactagctcttcctggctaggcagtggggaaccactgttttttagtaagtcacctgaactcattaatgctctgatatatcactcgcctgaactcattactgctctgataaatgactcattagcattgtaagaaatgggttgcaggcgggacaagcacctgttgggagggaaaggaatgtgtaatgtaaaacagtagtagtggtggggcatgggcacatttaagcagcagaggggtaggtgggagctggtggcaaggagtgggaagggagaggcaagatgacttcagattttagtttacttgattagcagcatagcatcaataaatgagttgggcgctatgaaaggaaaagcagatttggacattgctgagtttggggagccaatggaatatccaggtgggaatttccattaggcagttgtagataaaaggttcaaaagctgaggaaagggtctggaatctaaatctgtaagtaatcacttggaatttatacatccttggttttctttcctattatctctaaattatttcactattgttaatatatgtttatacctctgacactgtatgctgattagatcctgccttagagatagctcccttcccctctttctctttacagctcacatgttttgctctacctacaattgtttctacctgttggtatgtttagttctacctgattctactctatccgtcttagatatacagctctctctttccaattggaaaatgttccctacctccaaagtctttcacttttaacttatgtggaagataattatcgtgctatttagggaaaaataatcaagtgtgttatattcagatatatttatagtagaagggaccagtgcatactgaatattattactctcctaggcactacggctttggaaccactactttgccttctggtcctaaaaaaaattatttttgatgtatcagaaatatacatgataacattttccttatgtaaataaaaactattaaaccttttttatatagagcagtggacttccatactgctatcatttgaatataaagaagaaattttgttaatttacctagatttagattttagatttgctgttttgtcatttcgtgcccttaggcaggttatttaacctatttgatctctagttgcttggtatatgggaggcatgcataatattttgctgtgactagtaggttaaccacattgtgaaggaatttatggcatgatcagaatgttttttctctctctagatgttgttattcatgaggaccaatggattggtgagacagtactacaatcaacatttagcagtcagttattaaatcttgggagttattcatctattcagcctgaagaatgtaaggcacattttaaatgaagtaatgtattagtgtttaaagtataaaaacatactaggaaagattagggttaaaatggttcttttacaaaatgttttctaaacagttggagagtattggtttcttttcattagtaagaatgaaaatagaattttaagaaatgaacttgtacattgtaaatcacatttattttaagaagtattgggtctcatgtttcgttttcttaggctgtcagtatagtggtggttcttcaccttttagggagtcagagacctctttgagaatctatagaccatttctccagaaaactggacttatgtagataggcacaaaattttgcttataattctaaagcattccgtggacctctgaagttcttctgtggaacttctgagcctctgattaagaatccttgaggtaataaaaatgtattggtctcgtattcagacagctgtggtttgaatccttattctcctgtctaccactgctaagaaaagctatttttcttctttaatgtccagttttctcttctttaaaagaagctgtttaatgaggaaactagcagctatctcctcctctaggaaataaaataacataaaaaaaaagaaagaaaacaaagtaagggaaacagtataaacttgtggttttggtcactggactcagatagaccaggatttgaatcctggccctcttacttccagtctttgtctttaggcaagttatttcacttcactatacctttatctccttttctttgaaatggagataaaaatacatatataccttatagggttgttatgaagattaagtgagaaaatgaatataagatgttgaacctgcacataatgtagtagtaacatagtaatattagagggagaaataataagctagcaaaatatatttgataaaatgctgaaatatcatacaagaaaatagctagagaaatatactgattatacaagaagataactggaataataggaaagttataggatgtatatggaagatagagcatggaattccaatctttgaattcttaaagaaaggcagagcaagtagaagggaagagcaacaattagaataacaagaactgtgtttgggatgggcaaggtttcattatatactagggtggcccatcagcagaaaaccaactctgacatatttcatagacaactcaaatagagttcttcatctatccaatatatatttattatgtgttgacattgtttcaggcactgtgtttactgtacactgggggtacaatggtgcctgtcctcctggagcttatgttctcatgtggaagacagaccaaaaaaaatgaatgaaacagacatataagtaaaatatttgcaggtgataatgagtgctatgaaggaaactaacaaagggttaagatacagaatgccatggttctagttgagaaggattgatcatggagtagaatcagggttaggaagttgttacaatagctgcagttgagagataatgggaggccagtggagctaaagagccgagatatatttgtaaatagagttaataggattttctgatgatgtgggtctggggatcaggtaagagggacaatctactgctactggattactggtttaagtaactaggtagcctttattgggaaagactgagagggaactggtttgtggggaaaagggctatgtttcaaggcatgttaagttttagatatctttgagatattcaagtggagatgtcatataagaactggaaacaaagttcaggactcagaagacaggtttaaaattaagaggcaaattttagagttattagcatacagataatatttcaaatttaaaagtttttaaaataaatattatctgtataattatagaatcacaggggattgcaaaaataatacataaagtcccatgaactcttcttctagcttctcccaatggtgatatcttatataactttagtacaatatcaacaacaggaaatcaacatttgtataatactgttaactagtaatatactaggatactttccctttcagtatcaataaatatagtatcagcctggcacagtggcttatgcctgtaatcccagcactctgggtggctgaggcaggaggattacttgggcccaggagctcgacaccagcctggatgatatggtgaaacctcatctctactacaaatatggaaaaattagccaggtgtagtggtgcacacctgtagttacagctactggggaggcttaagtgggaaagaaagttgaggctgcagtgagccatgatagtaccacagcacttctgcctgggtgaccagagtcagaccttgtctcaaaaaaaatttttttcttaaataaataaatatagcatcaatacagcattataatatgattaatactatatcaataaaatagatacttagtcctaatgccaatgtcttatttaatagaaaagcactcgaggcattgtcattaaaaccaggaaaaagataaggatgtccactatctctgcaactattcatcttatactagaattatcagctaatgcacttagacaagaagaggcatctggtctggtgcggtggctcacgcctgtaatcccagcactttgagaggccaaagtgggcggatcacttgaggccaggagtttgggaccagcctggccaacatagcaaaaccctgtctgtactaaaaagatgaaaaattagccaggtgtggtggtgcatgcctgtggtcccagctactcaggaggctgaggcatgagaattgcctgaacctaggaggtggaggttgcagtgagcacctgtacactgcactgcagcctgagggacagagcgagattctgtctctccaaaaaaaaaaaaaaaaaaaaaaaaaagaaagaagaggcatttgaacatttgaatggataaagaagaatgaaaattatctctatttacaaatgctctgataacatacctgaaaactccagggaatcaaagttaaaacaaatttaaacaataagataattcaatgatataacaggatgcaaaattaatgttaaaaaatatcattaggctgagtgcagtggtttgcgtctgtaattctagccctttgggagatgaaagtgggtggacagcttgagcccaggaattcaagaccagcctgggctacaaaaaagaaaaaggaaaggaaaaagaaaaagaaaaaaatgctgggtgtggtggcacacacctgtggtcccagctgtttgggaggctgaggtaaaaggattgcttgagcccaggctgggggatgaggttgcagtgagctgtgattgcaccactgtactccagcctgggcaacagagcaaggccctgtctcaaaaaaaaaataataataatagtaattagacaatatacacaaataataaacagagggcataatgatagtgaaaaactcatttactatagtaataaagaagatagttcaaaatacagttaacaagaaatatgcaaagcctatatgaggaaaaaatttaaacactccagaaagaaatgaagacatgaataaatggaaagacattccctgttcttggataggatgactcaacattataatgatgtcagttcttcctaagttaatatgtaaattcaatgtagttccaatgaaaatatatatgttgtggcatataaaagttgatactaaagctcatatgggaaaacagacatgcaagaatagctaggaaaagactgacaaaggaaaactacagaggaggggaactagctttaccagatgttaaaacatactataaagcctctgtaattaaaacagtgaagtactgatgcatgaatagacaagtagaccagtggaacagagtaagaagattagaattagacccacctacatatagcaatttaatatatgacaaagatagtatctggaatcagtgagataaaagctaacttcttaataaatggtgctgagacaactgggtagccatttggaaaaaagggaaaattggacacatatctcacaacaaacagtaataaacaccatatggattaatagtctaaatgtaaaaaataaaatcatgcaacaacaagaaggaaacctgaatgaatcctctgtaatcttggtgtagggaaaggctttttcttaatattactcagaatccaggggcagtagaagataaactgatacattttactacagaaaaataaattttgcataaccaaaacactataaacaaagtcaaaagacaactgacaaacttggagaaaatatttgtaacatacaacaaaaggctaatatccctaatatataaagaacttttaaaccttgagtgacaaagtctgggtgtggttgttcacactggtaatcatagcattttggaaagctgaggtgggagaatcacttgagctcaggagtttgagtccagcctgggcaacatagtgagaccctgtctctacaaaaagtcaaaaaattagccaggtgtggtggtgcatgcctatggtcccagctacgtaggaggctgaggcaggaggattgtttgagcccaggaggtcgaggctgcagtgagctgtattcatgccactgcactctagcctggcaaaagggaaaatgtgaaaaagagatgaacagtcaattttcaaaaaaagatataaaaatggctatcaaatataacttattagagaaattcaaattaaaactacatggagataccatttctcacctatcagattggcaaaattaaaaaaaaaaatcacattctgttggcgcaactgtgaggtaatgtgccctcttatacattggtggtaggaatgcaaattgctacaacccttttgaagggatatttggcaatatctaacaaaattacatatgtacttagctttcaacctagcaatcccacttctaggaatctaccctgaagctacacctccaacaatatgaaaatacatatcagaaggttattcattgcagtattgtttataattgcaaaatatataggagaatgattcactaagttatggtgcattcacatagtggaacactatgtactatgcagctgtacaaaaagaatgaaaaagatctctacaaactgatatggagtgattcccaggacatactgttatgtgaaaacataaaccccccaaaactatatgtagtatgctgtccctcctgtaagaaggaatggaggaataagaaaatacctctgtttatttgtggaaagaaaatgcaggaaggataaaccagaaactaaagagattggtcacctacagggggcacgtaggagaggggtggaagaaagtggggaatgggaacaggatagcaggggtcaggaggaagtgacactaacaaatgaatgtattattgttacaaatgaacctaatattgttacaaatgaataaaataactacatagaagggggtggggaagaaaagaacaaacctaagtagctgtggaaaagagtatattgactggattctataaggctaatgacagaaaggactgtacataaatgctgcaatctagttagaaatatgtttctcaaaggcgaatggcttagcaataaccttatgtacatactagaatgaacaaatgagtacatagattgcagataaggaaagctggatttctcactgttggagaaagaaattataaacaagggaaggttaaaacgaaccagaggtatcgttataaactgaggatttttaatatagataaatggatacagaaatataggcatgtgtatatgggtgggatagtacacatacataaacatctcctagttctgtccattgagcgagcacagcacagatgcagttactcctcagtaataatgagcatacctggtgcccagatcttcatctgtaaacattttcttttcttttcttttctttttttttttttttttttgagatggactcttgttctgtcacccaggctggagtgcagtggcgtgatcttggctcactgcaacctctgcctcctgggttcgagcaattctcctgcttcagcctcccaagtagctgggactacaggtacgtgccaccacgcccagataatttttgtatttttagtagagatggggtttcaccatgttggccaggctggtcttgaactcctgacctcaaatgatctgcccactttggcctcccaaagtgctgagattgcacgtgtgagccaccgtgcccggcctctcgttttttttgagacagggtctggctctgttgcccaggctagagtacagtggtgcgatctcggcttactccaacttccgcctcctgggctcaagccagcctcccacttcagccttccaagtagccggtaccataggtgtgcactaccacgcctggctaatttttgtatttcttgtagagactggatttcaccatgttgctctggctggtctcggactcctgggcttcagcagtccacccatcttggcctcccaaaatgctgggattacaggtgtgagccattgtgcctggccaacatagttctctaatgaaaggaaccagctctgctaaaagtggttgattacaggactgggtcagggcaaattcaggataagcctggaagtctagtggtgccagacaagacatgttgaaataatgcaagagccaacctgaaggaacacctactggctaaagctgaagcaatttgagtaagaaaataatgatagtattggattagaacccatagattaaaatctttacaaatccttattgatataaagatatatttatttcattaactaaccagaggggaagagaaagctcttccttccaatggaattccaattaataaatctgagagaaaagaaaaaaaaatagagaattactggccatgctcagtggttcatgcctataatcccagcactttgggaggctgaggcaggtggatggcttgagcccaggagttcgagaccagcctgggcaacatggcaaaaccccatctctacaaaaaatagaaaaattaaccaggtttggaggtgtgcccctatggtcccagctattcgggaggctgaggtgggaggattgattgatcccaggaggttgaggctgcagtgagccgtgatcatgccactgcacttcagcctgggcaacagagtgagactctgtctcaagaaaaaaaaaaaatacaaaacacaaaaatagagaattaccatcaggcagagatcacaatcataaatactgcacggacacaaatgcactgatagatgctaaaattagtaggtgaaagtctgaggagagagagcattgcatagtctcaaagtatctccccaggataccagcttactagagggaaaataataaatttataagaaaactcttcagacaccaagttaactgagtgattggggtaaatatcaccagtaataagatgtatggtatcataaattctttgatattatccattgagaaggatccaccatattttttgtggaattgccaaaaatgcataacttcattccaatcataaaacactggagaaacccaaagggaaggacgttctactaaataattgatcaggattcttcataagtgtcaaggtaatgaaaaagaaaagactgagaaactcttatagactagaggagaccaaagagaaataacaactaaatgtgaggtgggatcttggatgaaatcctacatagaaaaagcatattaataggagaattggtaaaatttaaataacatctacattttaattaacaatatttaattaacgttagtttcctgtttaagataacttataatatgtgagatgcccacattagttgacatagtgaggaatataagggaactctgtactatttttgcaacttttttgtaagtcttacattagttcaaaacagagtttttaaaagagctgtatacgatcatctcaataggtacaaagaaagcttttgataaaattcaacacctgttcattaggaatagaataaaattttccttaacttcataaagagtgtctttagaaaacccagaacaattatcatcctaattggaaaaatattagaagcattccttttaaaattcaggaatatgactaggatactactattactacttttcttcaacaccatattagagttattaaccagtgcaataaacatggaaaaatagatatgtaaagattggaaaggtagaaataaaactgccattattatagatggtttacataccttttccctctgaaaactacaaacaaattattagaaataatgtgaaaatttagcaaagtagctggatataagattaacatacaaaagtcaatcacatttctagagtagagcgactaacaataacaaaggaagctgccattgacaacaatattattttgtactaatagtaataaatgtagcaaagtatgtgcaagacctaaaaaaggaaaaatttttaaatgaagaaaaactaacaaagaatgaaataaacatatactttattcattaattggaagatttaacattgtgaagatttcagttcttttcaagttgatttgtaaattcagcgcatgttcaataaaaatcctcgtaagatttcaagggcgcagtggctcatgcctgtaatgccagcactttgggaggccaaggtaggaggatctcttgaggcaatgagttaaagaccaataagattttcatgtaatttgataagattgtatgatatttatgtagaagagtaagtggttgaaaacagcagggcattttaagaagaaaagcagggaagaataatttaccctatcagctatcaagacttagtatgaacctatagtaactgagatggtgtggttttgcccagttgaagtcagttaaattttaattttgagatttctgtaaaagatacaagtttagtcttttattatgtatatttgaaggtgttacattttggaaagtgtgtgtgtatgaatgatagctaaatggcttctaagtaaaattcagcatatcttgtagatgttgatagaatagaaggggaaggaatgttttgaaataatgaaaataacatggtatgcaaatgctttgcaagagatttgggaaatgtagatatctctggttttaaggatgatctagattcaagtaatagttcagtaatttcataaaactcttatgacaaaattctggatggagaatattctatgaatcccctagagagtttcaggtttttgtagaatgatgtgaaaaatcttgaactaattagataatctttagaagttacttcacaatctttgtttttacacatacacaggaatttatggtgctttattttttacaggttagtagctaaataaagtatattctaaagtttttttattgatgtagggaaatggctaccagtggacattttgagaatattgcagttgtttttcttctgaaagagtaaaccgggtcatgacgcagcgagtttcagtcgtgacttttctgggggcatcgcggcgtcccctttttttgcctttaaagtaaaacgtcgccccgacgcaccccccgcgtatttcggggggcggaggcggcgggccacggcgcgaagaggggcggtgctgacgccggccggtcacgtgggcgtgttgtgggggggaggggcgccgccgcgcggtcggttccgggcggttgggagcgcacgagctagcgagcgagaggcagccgcgcccgccgccgcccctgctctgtatgccgctctctcccggcgcggccgccgccgatcacagcagcaggagccgccgccgccgcggttgatgtggttgggccggggctgaggaggccgccaagatgccgcagtcaaagtcccggaagatcgcgatcctgggctaccggtctgtggggaaatcctcattgacgattcaatttgttgaaggccaatttgtggactcctacgatccaaccatagaaaacacttttacaaagttgatcacagtaaatggacaagaatatcatctttaacttgtagacacagccgggcaagatgaatattctatctttcctcagacatactccatagatattaatggctatattcttgtgtattctgttacatcaatcaaaagttttgaagtgattaaagttatccatggcaaattgttggatatggtggggaaagtacaaatacctattatgttggttggaaataagaaagacctgcatatggaaagggtgatcagttatgaagaagggaaagctttggcagaatcttggaatgcagcttttttggaatcttctgctaaagaaaatcagactgctgttgatgtttttcgaaggatgattttggaggcagaaaaaatggacggggcagcttcacaaggcaagtcttcatgctcggtgatgtgattctgctgcaaagcccgaggacactgggaatatattctagctgaagaagcaaactgcccgttctccttggagataaactatgcttcttttttcttctgttaacctgaaagatatcatttgggtcagagctcccctcccttcagattatgttaactctgagtctgtccaaatgagttcacttccattttcaaattttaagcaatcatattttcaatttatatattgtatttcttaatattatgaccaagaattttattggcattaatttttcagtgtagtttgttgtttaaaataatgtaatcatcaaaatgatgcatattgttacactactattaactaggcttcaatatatcagtgtttatttcattgtgttaaatgtatacttgcaaataaaatagctgcaaacctcaaaaaaacaaaaaaacaaaacaaaaaaaaagagtaaaccaatttggttactcattttaccaatttggttttgattttgcaagtggttacaactcatgagaggattcttatttctgatcaatatattgtgtttttggaaaggacttctgggaaataattatgatgaagccctcgagcaattgcaacaaaaccaaaaattgaaaagtgggacctaataatacttttttaaaatttattttttagagacaggatctcactgttacccaggctggagtgcagtggtctgatcatagctcactgcagcctcaatctcccaggctcaagagattcttctacctcagcctcctgaatagctgggactacaggtgcatgcccccatgcccagctaatttttgtattttttgtagagaccaggttgtgtcatgttgcccaagctggccttgaattcctgagctcaagcgatcctcttgtcttagcctcccaaagtgctggaattacatgtgtgagccaccactcccagccccagaacaactattattaaaaagtcaaaaaacgacagatgttggtaggctgtgtagaaaaggaaatgcttgtacactgttggtgggaatgtaaattagttcagccgctgttgaaaacagtttggggttttctcaaagaagttaaaactgaactatgatttgacccagcaattccattactaggtatatatccaaaagaaaacaaattgttctaccaaaaagacataagcacttgaatattcattgtagcactattcacagtagcaaagtcatgcaatcaacctaggtggccatcagtggaggattgaataaagaaaatgtggtacatatacaccatggaattctacgcagccataaaaaggaatgaaatcaggatggtgcggtggctcatgcctgtaattcccacactttgacaggctgaggcaggcagattgcttgagtccaggagtttgagaccagcctgggcaaggtggcaaaaccctgtctctacaaaaaatacaaaaaaattagctaggtgtggtggtgcacacctgtggccccagctatttgggaggctgaagtgggaggatcacctgagcccaggaggtggagtttacagtgagctgagattgtgccactgcattccagcctgggcaacagagtgacaccttgtctcaaaaaaataaataaataaataaataaattgcagcaacacagatgcagttggaagcaattatcctaagtgaattgagggaggaacaggaaaccaaataacgtgtattctcacttataagtgggagctaaacactggctactcatggacatagaggtggcaacaatacacactggggactactagagggagagggttgaaaaactacctgttgggtactgtgctcagtacctgggtgacaggatcacttgtaccccaaagttcagtatcacgcagtattcccaggtaacagacctgcacatgtacacccgaatctaaagtaaaagttgaaaagaaaagacttctgtactttcatctttatagtgaggtgttacatgttttacaaacctagttctgataatgtgacaggaatataaatttatcttgaatattattaaatatataagtcaaagatcaacacagtgtttccatgaggtagactttttttggaatctaaataaccatgtgtttccacgtaaatttttatgaatcagggacaaatatataatttgatgtcagagatgtttttgttccccaaaagctctatcttgttcatgaaaaacgaagcccagagaagttatgtacaagttcacagagctcattattgacaaaaccagaatttgaatacaactcttctgattccagatttgctggaaatactgtgaaagaagaattcagtctggtagtattacgtgtggttttaattttttctttgtaactttagtttgaattttatgtgtgtgtgagcatctgcatttacttttaaaaacttttattgtaaaagccttcaaacatatacaaaagtagagaatacaaagcataatgaacttaagtacctattagccagcttattaaaacatggtcagtcttgtttcacctgttacatcccttttcttttactgtctaaaggaaggaaagaagaatcacaaatcagtttatgaagtctgctttctaaaaagtacttaagtgtttattgccaatatcttattttggtcggcaatcaatcacatactcaagcatacttctcttaccttcagagaaattaaaatttaatcagcaaaactcatcagcctgtacatttaaaatatatgcatgttattgtacagaaactataccttaataaaaagtgagaaaaaaaatgagacaggaaagagaaaaacatttaaaagacatagtaactgaagaattaaataaccaatccaacacttgaaaaatattacaatgtagcacatgcttaaaagctctctgagctcagggaaaaaagcagcactgtgaatctatagtggtcatcattctatgtggtattgggtaggacaagaagacagccttgcagctggaaattggtgaggacggaggcctcgtgtggaaagagtaaggcacactcagggagagaaccagtgaggtggctctgagcctgtttcagaaggggcttgaggaagaacggcagaggctaggatagttgggaaagcaggatcaaatcagactccagggattggggaaccaattggctgttacagggtggtggagtcaaaaaagaacagaaattttgtgtttggttaattgatagaaaatgatattattaacaaagtaaagaagtatgggaacagcacaagttttttggggatagtaaataattccatttccattgattaaaaatatcaagtttatttttacatctaaactgattcaagacttagctattgtacatgttttagagaaaacaaaactatattttatatctaatcatactttacaacataaaatacagttctaaaaaatattatttgtcaagaaaaatataatgttgccatcttttgtctgtatgcatgttttttttccttagattccagcgtagttagtgacgttgtacttcaagacttactggcatatgtgtcctcaaaacattcctacctcagagatcttcctccgagacagcctcagagggtgaacagtatagactttgtagaattggagcaccttcaacctgatgtgttagtccacgcagtactaagagttgttgatttcctatactgacaggtaaacattttgactgcctccttaattttagattatgaaaaaattaagatacaagaccatcttagtgtaccatttggttatcactatatatgtatcatcagctattaaagtatggtatcatgtgtgatagagtaatgccaactaagatactcattttccttttccagaggcagtatacagttatagaggacagaagcagaaaaaagttatgttaacagtggaacaggcccaagatcaacattatgcgcttgtattatggggtcctggagcagcctggtaccctcaacttcaaaggaaaaaaggtaaatacaccaaaaagcatttaacctatttatatttcggtaaatgattaatgtttatgagcccaagatggagaaaatcttaagagacgagacagcatttgaaatacaagtgatcatgattgaatattcttctgcaaatttcttctgttaaaattttgtacctcttgtagcaattcatttatctaataagtcttcattaattaatggtggtgaaataaaggcttaaatttattcccagatatactactttacctttttagtgaagatcttacctccttcaaataatgttctttaaacatttaattctggagaagcttctacaattttttttcagccagagtactctgataaataaatgctatgattataaggcagatgtcaagggagttaccttaactctttcaagtcacaattaatgttcaataaattacagtttcatatttttattatagttgttttaaaagcatgcactgttagccatccctagaatgttcagtgttaaaatatgacccatgattacatttttctttaaagcataaattatttctggtatattgaattaaatggaattgatgtttcattaaaatagtatagtgtcttccctttgctattgtgagatcctttagttgtaacaatcaaagacagtttcatttgtggcttatgagttatttttccctgctaaattaatttagagattgattcagtatattattattttttacctgaaagagttaatgtctctccaaacttctgccttccaaatagttatttgtagataggatctatcacattgtctctcttaatcattaatagctatgactaggatttgagataagtctaactttggacttttatgttaagatcaaacagggacagatgtttgtttggttgagcaagctgacaaacatgtatcagtgatagactaactatgatcattgaccaccatagcctggctgagaacatgagtctagtgcatgctacacaagaatgtaggtcacaggtatagtggagctgtaacagagcagattgctccatgtttaatgtgaatattcttttaaaattaatagttttttggttaatagaagagaaattacagttgtctctaggtgactctatggtgtttaggttagtattgaaaacgtatgaatccaggaattaagatgttgttgttctttgtacattcattcatccagccccccttatttgtaaccatcattttaaagttttaacatctacttcaatacctcacatcagtctttttaagataaaaataccaattttgaaggattacttaagtaattctattttcctgattttacttttcttttcaagagaccaaccccatttccaaattcccagcaaagagaatctgattgcccagagtaaatttgattcaaaaaactgtgatcaggaagacagggtcacgcaatacaaatatgagagcttgagcttatttcagtggatgggaaaacagttaagggaatcatttgtgatctgggtgaatacataaagatattcactaccaaaaatgtgtatgttcattagcttagaaagatatatgtaatgtattatttagtttaaaaagtagattataggccaggtgtggtggctcactcctgttaacccagtaccttgggaggctgaggtgggtggattgcttgagcccaggagtccaagttctcatcttaaaaaaaaataaaaaataaaaaaaattggattgtaaaacttcatgtatagaaaatatattatgttatcatataataaatatttttatgtttatataagttaatacacaaaaattttcaagaaaaccctttatatatgatagtatctcattttaataaaaatgtatctataagtacatatgtgcatttgaaaacctggaaatatgcatgtatagcaaaatgctagccgtagttatttctgtatagtagtattatatgtgctttaatttttttctttatacctttagtttgaatttcatatgtgtgtgagcatctgcatttacttttaaaaacttttattataaaagccttcaagcatatacaaaagtagagagaatactaagcataaggcactttttttttttgtttgtttgagacagagtttcattcttgtcacccaggctggaatgtagtggcatgatctctgctcactgcaacctccacctcctgggttcaagttattctcctgcctcagcctcccaagtaactggaattacaggcatgtgccatcatgcccagcttatttttgtatttttagtagagacgaggtttcaccatgttggccaggctggtctcaaactcctgatctcaggtgattcacccgcctcagcctcccaaagtgctgggattataggcatgagccagccaccgcacccggccagcataatgaacttcggtacctattagccagcttattaaaacatggtcagtcttgtttcacctgttacctccctcatctttactgtttaaatatttcacaataaatgtattttattttataattaaaaataaaattaaaaccttatgctttttaaaataaaagaatagttaatgtttggaaaatctagctaacaatgtgagaaaaaatagaattaaatttatactttatatttgtgccaatataaatttcagatacattagagattcaaatacaaaaataatgaaacaatgaatagtagaagaaaatataggcaaaattatttgtaatgcaaaggttggtagggtaaataaaatccaggaacaaaaactattatacataaaaaccaccatgtacaaaattgaaaggcaacaaaaaaaaaacagaaaaaaaattacattgtcagacaataatgcagtaagcaaaagacacatatctatagagttaaatggggaaaggatatgagtaggcaagtccccaaagaagaaataaaaatggccaataaatatatggaaaaattgttcttacaagtaattgaaaacacacaaagtaatgatgatagattatttttcttttaagaaattgattgagaagatatgggaaaacagctactgtcatcagctattggaaatgcaaactggcagaacctttcttgaggataactgacaattaatatgaacaaattgggggtacttttagcccaataattttagctctaggaacttatcataactatgtataaagatgtagctgaaaatgggtttatcatggtatcatgtataattgtgaaaaataaaaaacaaccagagtccctcaaaatagaggtttgctgtaataatttttaagattttggtgtatctggacaatggcatattatgtaatatttaaaagcaatgtagaataatacatacatataaaactatatttgacttattaagtcaatcccaataaataaaatcccaaacaactggttgtccgctaaaatgttaactgcttatttagggtgttgagattatggctgctatatgtttatttacttggcttctcttagcttacttttctaatcaggtattttgtaataagacaagaaagctattttagtgattggttttaagcagtaacttggaatatatgctttagttctagctagtgatgttctgtctttacagatttactgagatgtttgatgattttccaccaaaaaaaaaaaaaaaatctttagtgaaagaaactaaggagatgagcaggtgtagtaaattagatttatggcctgaagtgagaaactaaaaagacagctgatgttatcagaaaaatgagtgctaagaaaccctcttttgttttattatagttttgaagttgaatttactaatacagaatatgataatacagataagttgaatttactaatagagaatataacagtaacaaggtctgtgttactgtggctttaagtattagaattgtggccggcgcggtggctcccgcctgtaatcccagcactttgggaagccgaggcgggcggatcacgaggtcaggagatggagaccatcctggctaacacagtgaaaccccgtctctactaaaaatgcaaaaaaaattagccgggcgtggtggcaggcgcctgtagtcccagctactccggaggctgaggcaggagaatggcttgaacccgggacgtggagcttgcagtgagccgagattgcgccactgtgctccagcctgggcaacagagcgagactccgtctcaaaaaaaaaaaaaaattgttactgagagttaaaaataagtactattgtgtctaaatgctttttgttctagaaaagttaactaagataactaaagtattgaaatatgagtgaaatattagacttgggttcatttcagtgtcctttctttaacaaaacaaaacaaaactttgcctatagatagatacatgagaattttctttacagaaagcagttggttattataaatgatgaccgttcaggagggcaaggaatctttagaaaatattttattaaaattatctctggtggcccggcgcggaggcttatgcctgtaatcccagcactgtgggaggccgaggtgggcggatcatgaggtcaggagttcaagaccagcctgaccaacatggcgaaaccctgtctctactaaaaatacaaaaattagccgggagtggtggcacgcacctgtaatcccagctactcaggaggccgaggcaggagaatcacttgaacctgggaggtggaggtttcagtgagccgagatcacaccactgctctccagcctgggcaacagagcgagactctgtcttggaaaaaaaaaataataataataatctctagcatgcttctgttgtcttaatgcaccattcatattttgtctctgtttacccaaattctttagtgataaaagattagtattcaactgacttaatcagatcaatctatttaatctgatactaagcctagatttttttttcctttttggtgacttttgtttttactgtttttgtttaaggttatatttgggaatttaaatatctttttgttcagcgcaattacacactagaaaacctagaattgcatacaacgccttggtcatcctgtgagtgcttgtttgatgatgatataagggcaattacatttaaagcaaaatttcaaaaaagtgcaccctcctttgtgaagatatcagacttagcaacccacctagaggataagtgttcaggtaagatttttatatacataaattctgctatttttatttcttttgaaacagagtcttgctctgttgctcaggctggaatacagtggtgtgaacacagctcactgcagtctccacctcccaggtttaagtgattctccccgctcagcctttcgggtagctgaggagggaagggaaggctagtgcataccatcagtgcatgccaccacacccagctatttatttatttattattttggcagagacagagtctccctatgttgcccagtctggtctcaaactcctggactcaagtgatcctcttgccttggactcccaaagtgctggaattacaggcatgagccaccacacccagcccactgctagttttaatataagcaaaaaggctaccacttgtggtaaaaatgtataagtctatataaaagtgaaatataaatctttgcaaatatctgaactagattccagtagttttaggaactatgtgctaggaaccagggacaaagagcaaatacctattttttattatatgacaagtgggagcagaaattcagatccttactttatcttggccaaatgccagattaaaatgttactagttgggttaattcacatatatgtgtaaatatgttttccaatatatgattgaaggttagcattgttatatcataaaactatgctaaggagaatacaggcagaaaacaaagacaatacctctcaaaaaacccaacttttaattgaatacagagatttcattctcagagaagaactccttattcttagttctacactgaaacatttactaataccagcagatagtttaaattaataatatttctggaaggtaaacacagatgatagaaaatttataagcttttatactataaaaatttcatactattttcaaaaatggaagttgcctatggtcataaaagactctagatttatactaactggtaaaatcttggtaatgttatagcatcatgtaagttcctaagccagttttatatttatgtgcccctcccgtgctctgcttctccaacttcacagacatatagaggtggtcaccacaggaaggaatgccagacacagttgaggggctaccttactttgcagagacgtttagtttggtgccatggagaagtcaactctgttatttactgcttacacaaaacagttatctgctgggattgaagtctagaattaggtttaaaaataaaaataaataacatcatggacaacaacaaaataggaggccaccacgctgatgatgaaagattctcaggctatagccccacttgtttgaggacgcagccaggaattgtgcatgttcttggaagtcctggaggtgtgctcctcattagcaagccatgccaaaactgtgccattaaaatcagtccttcagaggctttgttcacagaggcctgtttagcctttttcattctctttatgttcagctatgagggctgaattcatagtttctgtcatagtgtatgtgtttttaagacaaaaatggagagagaatatgaaaacacaagcaacttttccctaacctattttatagttaaataaaaggagaaagagagatcagcatgggagcatttcctagaagggtctgcttgctcaacaaaagccagagggggatgaggctaggcctgagtccttgtaaagaaatgaagacgcttacccagtacctcatcttaccgccagcagaatttcagtgctcagccggagtgacccccttgaaagcaaagtccacattcagcgtgaccttttaattcttttcaagagttgtgtaaatttacaaaatgataggattatgtgaacattcttttaaaattattgaattattacgaattttttaggctgggcagggtggctcatgcctataattccagcactttgggaggccgaggtgggtggatcatttgaggtcaggagtttgagaccagcctggccaacgtggtgaaaccctgcctctactaaaaatacaaaacttagccaggcatgatgtcgggtgcctgtagtcccagctacttgggaggctgaggcaggaaaattgcttgaacgcaggaggcagaggttgcagtgagccgagattgcaccactgcagtgcagactgggtgacagagcaatactctgtctcaaaaaaaaaaaaaaaaaaaagactttttgagtggagggaggagagcaagggttgaaaaactaactgttgggtactctgcctactacaggagactacttgggtgatgatatgcccatgtaacaaacctgcacatctaccctctgaatctaaaataaaaatcgaaattttttttttacatatttttttaggccagacacattggctcaagcctgtaatcccagcattctgggaggccaagaagagtggatcacttgagcccaggagttggagaccagcctggtcaacatggcaaatccccatctccacaaaaaaatacaaaaattagccaggtgtggtggtgtgtgcctgtagtcccagctactcaggaagctgaggtgggaggatcacttgtgcccagggaggttgagactgcagtgagtcaagattgcaccactgcactctagcctggacgacagagtgagactgtctcaaaacaacaaaaaataataattttgtagtgatttaacatgtctttggaaagatgtggtattgaatcttctacagtttgttacatattcgatcgctacgcactcctgctaactcatgtagggatatgtgacacaattggaagagatgatgaaaccgtctttgggcattgaaagactaaagcaaatgaagttaagaacagaagactcatcattaactggactctgaaagagataaccagaaaacagtaggagactagagtgattagttcttgacctggagtgttcttacttctaagtggatgaagaagaacaaatttgaaggcttaaggcttaaagaagcctttaaattgactatggagaaagggagaataatgctcaagaaaactcatagacctcaccagtacacagtaagacaaaagtaaattaggaaaaaataatgtctgggagatagtagactttcagtatttgtttactggtgaatggatgagccattagcagtgaattatgaatatgcttgaggtttcttgtgagtcacctgagaaacgattaataaatgagaactttttataacccacagccagagtatatagatgataatggtgagcggaaagttggaaaaaagtttaaaagagaacaggctattgatatttttacgtagagagaagaagaaaagttcacctcctatttggcttttttttttttttttttttgagacggagtctcgctctttcgcccaggccggtgtgcagtggtgtgatcttggctcactataagctctgcctcctgggttcaagccattctcctgcctcagcctcccgagtagctgagactacaggcgccagccaccgcgcccggctaattttttgtatttttagtagagacagggtttcaccatgttagccaggatggtctcgatctcctgacctcgtgatctgcccgcgtcggcctcccaaagtgctgggattacaggtgtgagccactgtgcccggcccctatctggcttttcaccatgatcagtttaaaagaagacagggcaaggagagagggcatgttagctagtttcaagtattcgaagggatttcttctaaaggaggtattgaacttattttgcctgattccagaggatggggaaggaaggaaacatcacatgttcagccaaattagccaagtaaacctgctctcagttgcagccagacctccctgcccttagattctaggaaaatagtaaagaagacgaagaacaagacctcagtgtatccttttactacaagtgactgtaaatcaactataaaattagccatgtttgtaaattaaagttataattttggcccaataatttataacatatctgtttgttgtttgtaggagtggttctaattaaagcccagatttcagagctggcatttcctcttacagcagctcagaagatagctctaaatgctcacagttctctgaagagtattttttcttctcttcccaacatcatatatactggctgtgcaaaatgtggattggaactagaaacagatgagaacaggatctacaaacaatgttttagctgcttgccatttactatgaagaaaatatattataggtaaggcaactaagcaagccaatttgatggaaaataattattatagatctggaaaaactagtctgtaaactcttactttctaaaaagaattaactagagctagtcgaagagaacaaaattttccctgagtgatagatagctatttatggtagcaaaaattacccaggaatcgttataggaatttcttaaagataggaatttcttaaagcagtaattgggagattttattgtcttcaaacagctgtaccaaagaaacattttccttggtttactttttaaccaaaatctaaatgctcataaataactcattttcccaccttaacatataattagaatttaaaggctaaaagtaccatatgatgtcacctctgagttgttgtggaagctagtaagacatttaagctgttttcccacctttaccttagaaattaaagctagcaaataaatgttatatggtaaaactgctaatcagctcagtgaaaaacacattgttttttgaataataggtagtcaaaagctcagacatttttctctttaccttataaattacatgtgtttacaaaatagcactcagtgttttatgctccttatgattatttctaaatattgcggtatctaaaaactaaattcagatatattccacatgttatcatggcatacttcaagaaaagttatagaagcttaatttgtaaaccttatttctctttacagatattatgtttgttataaataagtgaatgaattttgctattactgtgaaagttgcttttgtggaaaagaagattgaattaagatgtatggtaggctgggtgtggtggctcatgcctgtaatcccagcactttgggaggctgtggtggggggatcgctggagcccaggggttcaagaccagcctgggaaacacagggaaaccccatctctaccaaaaaaaaaaaaaaaaagctgggcatggtgacataggcctgtagtcccagctacttgggaggctgaggcgggaggattgtttgagcccaggagatcgattgttacagtgagctatgtttgcaccactgcactctagcttgtgcaacagagtgagaccctgtctcaaaatcaaaacaaaaaatgcatggtatgtaacaaacaacattgatttattaatagttaaggcccctcaaaagtatgtataggtgacttatttatatcattccaaatgtttctattcaacataagcatttattggacaaaaatgttgctcaatactattccttatggggaggagggcctttgaatctttagtttacaaaatgactgttcaagagaaggacttcacagatcagtatcacctgattatggcataactagtatggggtatttaagatctcttcctaaactataccacattaaagatgtagtgctagtttgttgtcttactagaatgttgaatggtcatgttaaggcaagaattattattttttatttatttaaaagcctttttttttatttttttgagacagagtttcgctcttgttgcccaggctggagtgcactggtgcgatctcagctcatcgcaacctctgcctcccaggttcaagtgattcttctgtctcagcctcccaagtagctgggattacaggcatgtgccaccacgcctggctaattttgtatttttatagagacagggtttctccatgttggtcaggctggtctcgaactcctgacctcaggtgatccacccgtctcagcctcccaaagtgctggaattacaggtgtgagccaccaagcccagcctaaaagcctttaaattattagagtccagattatgtggtttccttggaaagaaaatattgaaattaacaaactcccttcaagttatcaagtatgtgactccaaaatcatctacataaatcaatcagcaaactgaataagagaaaactctcattgattatttttctaagactcagtcaaatatttattaggaatccacgtatgttcacatatcacatgtgtactgtggatgttatactagttgatctaagtagacttattgtgcccaagaagcttggtagtccatttaagaaacacttaatgaacatttgtgtggcacaacagtcccaaactatgagtgggttgatcatattttacattggttgtaacttggagctgattttccaatggaagcaacattagatattgcaatggagtctcatacgaggccacagacatttattaaattaacatgtagatagcatagttcctgctcttcaagctatcataaaactcaaataccatttttaacaatgtttctacagaatattcagatttacatttttggaatacaagaaatacatttatttttctgtactggaagcaaaaaaccccagcaggtcaaaccacaattaaggctcctatttaggcagcactaggaaatgtttgggtctctcaagaggttgtagtcaaggtgtaggctggggctgcagtcatctgaaggcttgactggggctggaggattcatttccaaagtggctcattcatatggctggcaagttgagttcctcttcacttgggtgtctccacgggctgcctgaatgttctcacaaagtggcagctcatttcctcagagcaggaaaggcaagaaagagagttccaggtggaagccagcctttttgtgacctagactcagaagtcatgtggcatcacttctaccaaattctgttcatcagaagtgagtttagctgtgcgttggagagtggattagaatgaagctagtgcagagaagcggtaagaggctgttgccttattttggagaggagatgatggtggcttgactagagaggaagcggtaggaataaaaagaagtggacagatttgagaatggtcagaaaatagtttgcaagatgtagtgattggtaggtaaagagagagcacaggtacattgcaaatcattgacagttgggtgaacaataagattatttattaaaacaagtaaccttgggagaaatcttgatcatattgagcttgagttcctgagaggtaacaagttggaaagtggttagatgtaaagaaatgcaatttgcaagagaagtctgggctaggcttataaggttatctgtggtgattgaacttttccttggtttctgcaccctgttttgtttttccttcttaatcttcagtgattacctctcataatggattattcttactagcctataaagacagtcccatatttctcttattaaaaaacaaacaaaatcatccattaacattacatctccctcttatcccttcgtttttctattctgttttatacccagccaaactttgttaaagagttgtaaatatactctctctcccctattatgtcttcagtttcacttcagttattccattctactcctaccatgctgcagaagctgcttttgtcaaagttacacttttgatgttgcctgaggcatggatacttctttcctcgctctaactgctctcagttatattcagcatgtcagtccacttcctccttcttgaaacagcctcctccttgctttctaacctgtctctcaggcccttctttctcagccttttctaccccctctttaaatgctctcgtctgtgtccttcctcttattctttctgtacattctgcctggatgatcacagctgttttcgtatttgtacttaacatcttcaccctgattttctcctccaggctccagtagtcaggtatcaaattctttgcttgatgtccatctcacatttaaacatacccacaatagactcttgtttttcctaaaaccacactcaaatctagttctcttcgtttttatactttctggaaaatggcacaccatctacccaattatttaggctggaaacctgggcacaatcgttgcatcattttctcttccctacctcccctatctaatctattagcaagtcctaggaattttcattcagaactatatcacaaattcatccacttttttccatctccactgctaacatcttagtccagtgtatcccagcaggggcattgttgacatttttctcaggacagtttctcattatgtaccatatcccacatgctgcggggcatgtggcatccctgtttaccttcccctagctgaacctcaattactgtgaaaccaaaatggaaagtcagtgcctgctggtctggaatcactcaggcctcatctgagtccctactacctgttgcgcaaaccagcacaccagcagtctcttggtggggctcctcctggccttgcctcctcccctttattctccacccgttggcagtgtgattaccctttgcttcacccatcagtcatctccttatgcttgtttcctctgcagtctcatctgctgccactcccctgttgtccagcactctagccacgtggccttctttcagttcttcagacattttgatttttctccttaggatgttctcgaatgtcttccctctgactccacaaggctggtttcttcatgtcttagattaaatgctgctttatcagagaggcctctcctaaccacccttctttattttctgttatagtagcctgggtgtgcttactgtaatttgtatttgcatactgtcttttctaaaaaacatttttactgaagttaaaattcatataccatcaaattaatcttctgaaatgtacaattcaatggcggtagtatattccaagggctgtgtagctatcaccacaaccagttaggacattttcattacccagccctttacaaagcctcatactcattagcagtcactctccattccccatgcccctcaacccatggcaactacgaatctgctttctgtctctatagatttgcctgttctagatattttatataaatattatataatatgtgatcttttgtgactggcttcacttagcatgatgttttcaaggtccatccatgttgtagcatgtatcactacttcattcctttttattgcaaaataatattttattgtatgcacataccacattttatttatccattcatcagttgatggacaattgggttgtttctactctttggctattatgaatgatgctgctgtgaacatttgtgtacaagtttttgtgtggatatgtgtgttcatttctcttgggtatatatctaggagtggtggaattgctgggtcatatggtaactgtctgtttaaccttttgaggaactaccaggctgttttccaaaattgctgcacaattttacattctcatcagcaatatgagggttgtaatttccccatattcttgccagtacttcttattccgtttttctttttgttgcatgtgctttcgggtcatatctaagaaaggtgtcatttctaagccaaggttatggagatttgctcccgtattttcttctaagagtttagtagttttacctcctacatttaggtttattatctactttgagttaagttttgtatatgggataaggaaggggtataattttattttttggcatgtggatatctagttgtcccagcgtgaatttttgaaaagactgttccatccctgtttagtcatcttggcaccactgttgaaaagcttattttctttcttcttctttttgtagagatgaggtctcgttgtgttgcccaggctggtctcaaactcctggcctcaagcagtcctcctcaccttggcatcccaaagcgctgggattacaggcatgagccaccgcgcatgcccaatttcttcctatccctctacagttttacgttccttgagtgacggaaccagatttgtctttttcactagtgggtacccagcacttaccacagtccatgatagatactcagtttgtatttgttgaaataaataatggagggagagagaggctgaggaaagagtgtagagtgaaaagaggaaggaacatagagtcatcgtgtgaataaagggggaagtgggtttttagggggaaaatcagtagttatgttttagctctgttacattaaattcccccgctaatgagcctgtttctgaattctgttctcaatttattttttaaaaatcaatgtagttataaaataggtaccacatgccatggttaaaatgcacactacataggaggttataaaacaaagagtgaaagtctccttcaccatccaaccctctcccaccagtgctgcttccatgctggtgagaaggttttttgtatgtccttccagtgatttattatgttcatcccagcacatgtgtatccctttctttagaagcatgtggacagaagaatattgttcatattgttgttccctagagtctatcctggtgctccttccctaatagcacttgcaaatgttcttcattctttttatcagctacatagcattaagatgtaggatgcactgaaaattgttaatccagttttattgatatgcaaaacagtttatttctgataggaaagaattcagttgaaaaaagtaacttgaaattgtgattgtgaaatatgtgattattatttttattttcatttctaaaaacaatttataaaacagtttaatatatttttatattagtatctgaaatttaaaaatggatatagaataaataaaatgtagtaatttatcatttgaagctcttggggaaaaaaaaacctttttttccttctaggatgtcacagaacatcctagagttgttttaagcattaaaattaatcctgcattaaaaaccaagtgctttttggaattatttttcatttaaacatttcttttatttgaaaatctttttgaaggtcgtgtgttgtttactcttctgtaggccagcgttaatgactgccgttgatggaagacataatgtttacatccgtgtagaatcaaaactgatagagaagattcttctcaacatttctgcacactgcctcaacagagtgataggcaatatatcagtgtgccatcaagaagttgttttattcaggagtataaatggtatatcggaacagaaagagcactctactttaaattaagagcttttctgtccatatgaaaacagaaggataatttagcttaagtgaaatataagcctatgtaagttagaaggttgacttgctttacacctgttagtacatgaacagtgggaggcacctaatttcttcttaacctacatttcctgttggtaagcaaaaactattttacttaactctagttttataagaatgaagtcaatgagtgtatgacataatatatatgaagatagtccagtgtcagtggaatggatttgcaagatcttcaaccatgatgtcttagttgtcagtggctaagaataaagcaaagataatatatttgtcaggtattcaaactccattcctgttctcattagcctcagatcctctaagctgatgagctaatctggttctgtgattgctttatctttcaatagtagattgtttttcgtgtttttttttagttgggggtgtctagtaattttgggttgaatgctgaacgttgcatatattaagtagaacagtacaaactgaggtaaatagtagttgtacctggaaacaggcatgcctcttctggtcctttactggaggtgaggggtgagcaggatggtcagccttgtcataagttgagttggattcaggttttgttgtttctctggttaccttcaggtcaccactggtttcaaattatcttgtgcttatggtgggaagtggttccccagtattcctgctccaccatcagcatagccctccactctgcacctgggcctcagagaaagtttctttccatattcttgcacctccccaagttgcacaagcttttgttggttgttatttggtgcatcctaacctggtgggtgggagcagggttgttcctctttgattctggtccagccccagtcttatacggatgttgcacatggcgctttcttggtagccctgtcccttatgtggcatggcagctgagctctgtcttgtgcctttagtgggtcttgtgtggtcctggccctgccccagcagtaggggaccactaatggtcttgacccagggtggtttttcagtcctcccccaggatggaggtttttttttttcttttttctttcccccatctgtactggttcctcacctgtaccctggggcaacaggatttggtgtccctcctccagcaattgaaggcttttgttccttaaaggggaggccagatggtgctttgtgttttgtagttggaagctttctctgatgtcttgccctgcccccagtcttatgagcacctggtggaggtgagacgtactatgtggaagagcctatgaggatgcagatgttccttatgttgctgacactggcagttcattggctttttgcaattaatttattaataaaaattaatcacattcttctttcctgcctgtatggaggacctgtcttcttcccaaggcctgccccaagggaacctgtgctcctgttccatctccctggaggcacctgtctccttatgtttcagtctttttggctgttttacaaccttggttctcatgtgtattcaagaaaatgatgattttatatttattcagttttttccagtaactgttagggtaggagccactttttccagctttctacatcttaattagaagcctctctccgttttttcccccattttctttatttcatttttattcttttggctattttcattccttttcttaatgttacttatatattttcagtgttatctcttctttttttttttgagatggagttttgctcttgttgcctagactggagtgctgtggcgcgatctcagttcaccataacctctgcctcctggattcaagcaagtctcctgcctcagtttcccaagtagctgggattacaggcttgtgccaccatgcccggctaattttgtatttttagtagatatggggtttctctatgttagtcaggctggtcttgaactcccaacctcaggtgatctgcctgcctcggtctcccaaagtgctgggattacaggcgtgagctgccgtgtccggcctatctcttcttttttgcataatgtaaattagtctttatctcttagagaagcataattctcatatcacatatacttcagtgttttgtccattcttgagacaattaaagttgtacttcttggcattaattagattgtgatcataagtcaaaatgtcattggtcataaagtggtcatcagaccatgcagactattactaatattggttatgttttagtttattgcagtgaaaatacaaaatttaaaagttattgtagagaattatcataccccccaaaatatgtcattggtcctccaggactctgtagtccccatccaagaaagactgtgataattgtcaaggggttagtacggtctgagcatggtcgatggtgctctgtcattctggtattgaacaacctcccaaatgtcttgattacatgtcctaaaaaagtgaggggaagagtgtaggacaaatgcaaaataaaataacacatttagctatacttttagtattttttattattgagattcaatatttaagtgaccgattcaagattcttttatataaaaaatgaatatatgcataagtaactgtgataagaactgtggatggataagagcactcgtctgatgtactgcagcataaccagaactgctgtcggtctgaacggtgtgttatctgggcctgtttcttgtgtcagggggatcacatgccgtcactctggagtgcctcaatagcttgtaactagaaagagaaggtatagaaagagtagtttacttacctgtttatttatttagaggcagagtcttgctctgttgcccaggctggagtgcagtggcacaatctcagctcattgcaacctctacctcctgggttcaagcaaatctcctgcctcagcttcccgagtagctgggattacaggcatgtgccaccactcccggctaatttttgtatttttagtagagacagggttttactgtgttggccaggcatgtctcgaactcctgacctcaagtaatccagccacctccgtctcccagagtgctgggattacaggtgtgagccaccgctactggccgggaggagaaatttaaaatgggtttgagacttgaggaaccaaaagaaacaatgaaaccattcaatgtgtgtgctcctgtcaagctagcagcgatcttgagagctctgtgttttcgtcttctgcagttccttcctcagagatcacctatgggatggttgtggcagacctgttccactccttgttggcagtcagcgcagaaccttgtgtattgaagattcagagcctttttgtgttagatgaaaacagctatccattacaacaagatttctccctcctggatttttatcctgacatggtaaagcatggagccaatgcccgtctctgaggccagaggaagaaattgcaggcatttcaaggaagaagtactgaaatgatttgtcttttgaaataaatgaatgacagggcttttgctttggattttttatgaaatatattttacaaagagaattgcactagataaattaaaacttttttctaagaaaatcctgtgaggtttaaaaagattgtttttgtcttttggtttcttcctttcttctggagaaatgatctaccagtcaaggcaatatgtagcagatccctgggaattaaaggtttgcccatttgttcactgtatttagtccctgctacattccaggcatcgtactaagtatggggaaccacagagaagacactccttcagaaactgctgcagtgctttcgcttatccctacctaaaaaaccgtcaatgtgaaatcatttccttgattataactataatgataatggattagtttatataaacctatgtttagacaagttcaagacaagcgtgtctttctataaaaagtattgaaagtgaaggaaatgagatcatgtttcaatttattaaagcagggaagagcgttctgtggttagttcgtgtctaggatttgagtgccttactgaatgtatttaccagcaaacatgtagcaatctgttctctcattgtgattgtggaagaagctcatgtaaaatgatagtcattaatgaggaagtatggcgtggtacttattctgtaagctcagagtatgctgagtgttaatagattgtcatattgcctgaaaataaattcatgatgacatgaacaagcttcttttaccctgtgtatgtttttaaaaattcctttggttcagaggtggttgttgttttttaacttggcttccctaagaacgaaccacaagagttttgtgattctttcaaaaataatatgccaaaatgcctttgtgggagcacacacacacaaatgcatgtttctgtggagaaggatccatagctttcaacaaatcctcagagggttctgtgaccaagaaaggtaagaacaaggctttaactgatgagtttctttgtggggtagataagggaattagagcaaatgattgccaaagttttgtctagcaactaataaggtgggtacagaaagaattgactccattttgtatctagagagactggaattcaaacaaaatcattggctcccttcaatgattcgttgaatgggtgatgaaacttgagcctgtagttgacgccttctaatctgtgctctctcaactataaccacactaggcagagatttggaattctgatataaaatctgcccagtcaatataggccaaccaagagagctgttcgcttaagtgtgcccttccccacttcgtcctcaagtggagacctaatccctacatcaaccagaacataatccccaggaagagatggctcttcacatcctattgggaagaaatctttaaaccatttcaggtgagtcaacagatcacaccaacatctcttcacagttgttggtatgtatttcattaattaacacatatttccaggagcccttatttaggttgggaactgtttcctccagtcctgaggaatctgagctatctacagaagttatgagctatttaagtgggatcaggatcagcccattgctcctgctatggtctgaatgtgtcctcccaaaattcttacgttgaaacctcatctctgatggcattcagaagtggggcatctgggaggtgattagatcatgagggctctgcccttgtgaatgggatcagtgcccttacgaaagtggcccgagggagcttctttgtccccttctgccacaggatacagccagaaggtgtcatctttgaagcagagagcaagccctcactagattctcaattttctggcaccttgatcatcccagccttcaaactgtaaaaaataagtttctgttacttataaattgcccagtctgttattttgttatagcacccagaacggactaagacaccttctgtgtgtattctttacctgagttgacaagtaagtgtctttattctgttatgttttcataaaactcagtggggtagccagagtgtcatccagcagtcccatatctggcagtcttatggtgggcatttcagggagacctcattcttcatcttctgttagttcagcttgcagggacagctctcctatttttagagaatcatttttatttgttagtcacttagtttccccagaggtatcctttttctaacagcgttagaggcattcacctttctccccactagtaagatctgtgctgtttcattttacatctttttttttttttttggttgggggaaagggggctgatcatcaaatgagttgacaacattgggtgcatgatccaccctgcagacgttcgctgaatgtctaccatgtgctaggcactggaaatgcaaagacacaaatgtctgccttctgtaagttcacaggcaagctggtgaagaaatatttaaacaaaattatatcagcgccaggattaaatctgtgtggaatacagagccaaggcaaaagaggtaacagtaggatgggtttgttagtcatgactcttggttgcaagtgataaaaacccaactcagagtagcttgagcaaaaaagggggacttgattgactcacataaatgagggtagtaccagcttaaggcacagttgaatccattggcctaaattacctggttaccccaactccctaatttttctttctttctttctttctttctttctttctttcttttctttttctttctttttctctctctctctttctttctttctttctttctttctttcttttttctttctctctccctctccctctctctctctctcatcagaagaggtcttttacgctgttattgcaaaagcatagatgtttctacagagttttgataggataacattttcacagtgattatgaatttacatcgtccctagaattctaaactactgggatctgaggccgtaagttgtttaagagtattctgacattaccttagattcagcaaaacttgaatagttgatcatgcctttcttagaagaaaatatctgtaatttctcagaacaatatagaatgagacagaaaaactaaccatccctatgtgccttattttaagtgatatatttgtatcctgatgggtttctaggtgttggaacacaggtcatgaatcatagaacaattagaataaagtgttcgtctttatcagtagcttaattctggcccttgatttaatgtcaacaggggagaaatgtgtgagaggggatgaggtttgccaattaattgtcattatgtctttggaggtcttgaacctgatttgttattaagaagtgaattctacccacttaaggcatacatttgctaaaggtgacctctctgcttccacgttgttaagaaatcgtgatttttttcaaaacaatcatcagctttacagtttttgaggaaagatctagaagcctgttaaaatggacttaccaggcagggttcagcccaggaaacacaagccactctgggtattctaaacagagagagattaatgtggaattcaggtgtttgcaaaggtattggaaggctggaggagcaggcatcagtctgagctccaggaggctgccacgtgaacggtggattcatgaaaacatcatcattggctgcaatcttagactgaggatgcagctgctggcatcccggcaactgactctcaagcacatggaagctgggagttatttgctgctgcccaaaactcagtccccacagctacacttgccaggaacagtagcttcaggaagatagcctggatttcactcatcttccatattgcacatgtgtgtgtgtttcattgatggaacatgattcacgctgagagctttagctgcaagaaagtttgggaaatatgtcttctctgaggcttttggtctttgcagttcaggagcagttaggaggtgggactggttggttgcagagtgagctgatttactgcacttagtctagcttattaaaggatgagcttataaacaccccaggtaatatcacaatacataagtgctacctaattactgtgtgggtctgttaccaagaatgtctaagtcaagaaattgaagattgtttccttcagattctgcatcctaatgtagaatctttcctattagagtataagtaaattattttggtgtgttatttaagaatatttgtgaataggcttaattaaacaccatgttaagaaattataaacttaaggccaggcacagtggctcacgcctataatcccagcactctgggaggctgaggcgggcagatcacttgaggtcaggagtttgagaccagcctggccaacatggtgaaacctcatctctactaaaaatacaaaagttagccaggcgtggtggtgcacacctgtaatcccagctacttgggaggctgaggcaggagaattgcttgaacctgggaggtggagcttgcagtgagctgagatcacgccagttcactctagcctgggtgacagagtgagactctgtttaaaaaaaaaaaaaattataaacttaaaaaaaaaatgttttcctttaaacaaaaacgcatgttccttgttttttgttttgttttgttttgccttttttgagagacagtcttgctctgtcacccaggctggagtacagtggcacaattatggctcactgtagcctctacctcctgggcgcaagcaatccttccacctcagcctccctggtagctgggactataagtgcagaccacaacaactgattttttattttttgtagagacagggtctccctacattgcccaggctggtcttgagctcctgggctcaaccgaccctcttgccttggcctcccaaagtgctaggactataggcgtgagccactgcaccaggccgtttctttttttttaaaactttggaaaatatggatgaatgaaagtgagaaaagtaacccttctgttattctaccaaccaaagctaattgctgccaacattttaatagatattccttcggttgttttatgcatgtatgattttgtacatgtgtctactttaaaatatatagtctttcaatgttgcccaggctggactcaaactcctgggctcaagtgatccatcacctcagcctcctgcatgtatctacatcttattttattttatttttagagacattctgttaaccaggttggagtgtagtggtgtgatcatggctcactgcagcctcagcctccctgggctcaagtgatcctcctgcctcagcctcctatgagtagctgggactacaggcatatgcctccatacctggatactttttgtattttttgtagagacatgtttttgccatgttgcccaggctggtctaaactcctggcctcaagtgatcccctttgcctcagcctcccaaagtgctgggattacaggtgtagactaccacgtctggccaacattctcattgatagtctttgcacacatctttcattccttctgggaatttattctaagaaaatagaattttggggtcaaagtacttgtatgtatgtatctgtaccaggaaaaaagcagaaattccagtatcaacagataacgagagccacgcagggtggtacatgcctgtagtcccagctactcaggaggctgaggcaggaggattgtgtggcatgagcccaggagttagaggctacagtgagctatgattgcaccactgtactccagcctgggcaatagagcaagaccctgtctctgaaaaaacaaaacaaaacagataaccattgttactattttgttgaacattttccagataccctgatagaagacagatctgtgcatgcacatacacaattttacataaatgggaccattccatataggccagtatctagtgtgtactttttttactccacaatttgccatatacgtctttccaaatcaatcaacatagattaaatcatatcaactacacaggattccatcatttgtgtgtgctcttgaatcctacttttaaaatgttctcagaaaggttatcctgaaatatattcctatcagaagttttccacactctctctaaactgaatggcataagtgaaagactagttgttaggtttaaaaaaggttatctgttttaattggaattttttttttgaggttttctttttcttttttctttttctttttttttgagacacagtttcactctgtcaccctggctggagtgcagtggtgcgatcttggctcactgcaacatctgcctcctgggttcaagcgattctcctgcctcagcctcctgagtagctgggattacaggtgtgcaccaccatgcccagctagtttttgtatttttagtagagacaggattttgccatgttggccaggctagtcttgaacttctggcctcaagtgatctgcctgcctcagcctcccaaagtactgagactacaggtgtgaaccactgttcccagccttaattgaattattttattgctaaagtgattgtacatttgcttcatatgcttatcagtcatttgcagtttgctttttcatattttaccttagaccatttttatgtgggagaagccttttattaaattagtatgttctccttataaagttagtaatttttaacatgtgttgcagacatttttcccaagcttgttatatatgtttgacatgcagaaatcataaatatttacgtggatcaacccatcaatctttttctttattgtttctagattttatggcatgcctagatagcttcttttctactataagattatacacattttcttcaaaaaattttttgaaacatttatgattgttatatttgtatttaaatctttaattatctaaaatttagtgcatggtatgaatggatctaactgattcattttcctaaaatggtcagctggttgtcccaacactattgatttctttctttcccatcagtgacatagatgtgatctttattataatatgaaattattattcctgctagcattacctgtggactttctggtctgtttcattgttctatatttattgctgagccagaaccatacagttagaattattataactttacatctgataggaaaagtacccctatatttttcttcattaaaattgtttttctcagacatctttgcccatctgttcttttttattccccattaagagtatatgttgcagtgttttttagtatattcagagtgtgtgaccatcagcacactcaattttggaacatttcatcacccccaaaagaatcatccatagttacattaactataccaccccacagctcttccttaagaggagctaacagtcgctcctccatacccaccccctttcccccaaccctaggtaaccactcttctacttagtggctgtatagatttcactattctgacatttcacatgaatggaatcatacaatatgtggtcctttgtaactgatttctttcacttggtatagtgttttcaaggttcacacatgtagcatgtatcactacttcattgtttttattgccaaataatattccattgtatggatataccgcattttatgtatctattcatcagttgatggccaactgagtttttcccactttttggttatttttaattatactatcatgaacatttgtgtgcaagtctttgtgtggatgtatattttcatttctcttgggtatgtacccaggagtggaattgctgggttgtatggtttaaccatttgaggaactgccaaacttttctaatgcaggtgcactattttacattcccatgagaatgcattggagttctgatttctccacatcctcaccagcactttttattattatctgactttttgattatagccatcctagtgggcatgccatctgttcttgagataagtttagaatcatttttatcccattgatatttttaatgagattgctttgaatttatggatcatttggacatgttttcagtggttaaggcttactatttaagaagagcatgctttttcaattaataaagtattctttaatgttccttagctttagctttatttagcagtccacatttaaagggtattaactatggaaatttttttttttttgatacagggtctcactctgttgcccaggctggagtgcagtggtatgatctcagctcactgcaacctctgcctctcaggctcaagctatcctcccacctcagcctccttggtaactggggctacaggcatgtgccaccacacctggttaatttttgtattttttgtagagatggagttttgccatgttgcccaggctggtctggaactcctgggctcaagcaatccacctgcctcagcctcctaaagagcttggattacaggtatgagccatcagccagtttttttgtttttttaaatcattgatttcaactatgctctgttgaatcccttttccatcccctcatgtctcacatgcctcacataacttcccaggcattgtgttttagaaagtctggtattgtttaaattctaacctcattttgctcttctccagagcatgtccagctagtcactaaagggacttggaatggggaggagataggtgcacccttcctttcctttgactccagctgttggagctggagggagggcgtgaactggcaccgaggtgaattctccccattccttcccagcttcctgaggcctagctcctccatgagctggggagggagaaaagaaggaaaggggacagtggtacttaccaggcagctaccactgtggtcctctcctttgatggactccgcttttctagccagtacttaactgctgatgccttctgtgcagcaggcgttgagtactcctctttctggggtccatgtgagagttctttcagagctcactcttctatgtactctatgtactcactctatcttatgtacacagttgttttcatgggagatgcagctctgtctggtctttcctgccccctccactctctccaactgtacctcctttctccatcttgcaatctctctctgattcacttcactcgtgctcagacaggcatggagagcaggtcagcaaattcttcacactatcagactttagacaagctaaggaatttccttctctgcatactgtatatagcacagtttgatttatgtaacatcctaatcatactgtctggaagaatcttaccaaaatgatattattcccctacatggggaattagggcttgattttaccttctttattataattatttttacttgatcaaattactaggaaatattcctccacttctaaagaatacaatttccctgtgttagaaagatcagttctggtgtggtggctcactcccgtaatccctgtaccttgggagcctgagatgggaggattgcttgaggccaggaattggagaccagcctggacaacatagcaagatcttgtctctataaaacactaaaaaaaaaaaaaaaaaaaaaattagccaggcatggtgacacactactcaggaggctgaggcaggaagatcacttgagcccgggagtttgaggctgcagtgagctatgatctgccactacactccagcctggatgacaaagcgagaccctgtctctaaaaaaataaaaccaacaacaaacatacataaataaaaagatcacatccaaataatagaaaaagatgatatggttttggtccccaaaactgacatcatgtaggagatattggaactttgtgggtgggagccaagcccattctggtgccccttctctaggtcacgtctatactgcttgtttggattccttggcaaaaactgattatgcaaggcagtaggatgcctggctcaaattgggtcaatcagatcctttttcttggaatttaaaaaaaaattgcatgaaaacgtatagttaaatgcacaggtcttaagtgtacaatttagagttttgacaaatatatacattcatgtaactgaaccccaaacaagatatggagcatttccatcaccctagaattttcattcatccccacttccagtcagtctcctccatccatgatggccaaccactattctgatttctatcactatacactagtttgatctttgtttggacttcatgtaaatgaaatcatacagtatatattcctttgtaactggctttttttaacctaagaatgtttttcaggcttatccatatttttatgtgaatcagcagtttattcttttttattgttcagtaatatatcaatgtgtgaatatattatccattcgcctgttgaaggtcatttgagttctttccagtttcgaactattatgaataaagctgctaaaaacatttttaaaacaagtcttgttgtggacataagtttttgttggggcagggatttaaatagctaggactgagattgtcagtttattggataggtatatatttaacttgagaagaatctgccaaacagtgctccaaagttgtgcaattttacactctccgcagccaaaatggaggcttccagttgttgtacatccttgtcaacatttgagatgtcagtcattttcactgtagccattctagaggctgtaaagtggaacctcctggttttggtttctctttcactgatgactaatgatgcacaacttttcatgtgctcattggccatttgtataccttcatttgtgaagtgtctctcaagtcatctgcacatttatcttattgggttgtttgtctttttactgatcagacatatgtattctagataaaagtcagatatatgtattattgatatttcaaagcattttgttcagcagtagaaatgctggctatatgatttgagaataaaaatacgtatgtaatcgtaacaagaagtcttaaataaattaaaatgtcactattttgaataactagaatatatattaagaaaaataatcccaggaaataaaaaatatgctagtaatatattaattacacataacaaatttacaaaattatattaccatataacagtaatacataattctaaataaaaataatcatgctcacagataaaaccaaaaactttaagagcttaatttattgaaaggaaatgatttaaatatcatgagggaaataaaaggagacaagaagtagtggaacactctactgtgctcctgctgtttgggaagatgtactatacagagttaattcaacaataaacaaagtccctgagggatggcctatacaagttgacaagttgatgtaaaaattaattgagggaattaaacagaaatgtaaatattccaataaccatcgaattatacattttaaatggatgaatcgtatatgtgaattatatctcaataaaacgattataaaaaaagaataaacagggattttttttttttttgagacagagttttgctcttgttgcccaggctggagtgcaatggcacgatcttggctcaccgcaacctccacctctcaggttcaagcaattcttctgcctcagcctcccgagtagctgggattacaggcatgcacctccatgcctggctaattttgtatttttaatagagatggggtttttccatgttggccagactggtctcagactcccaggcttaggtgagcctctcgcctcgctctcccaaagtgctgggattacaggcgtgagccactgcgcctggcctaacagggaaatatttttcaagttaaagcaaaaaaacaaggtaagccaagtaaaactatataaaaatatatgattttggtgtttacagcgcattgggtaaaaaatcttactcagaaacagtatgtaaaatatttcatttttagaaaactatacattaaatcaatggagagtggccaaaaaattttaacactgtttatctcaaggagctacaactatggtaaatattttccttaataatgaaatgtggaaacatttctgagaacagaaataagacgaagatgtccattatcatcacttgtattcaatactttcctggtattcctaacaagagtaataaggcaaaaaagttgaaataaaaatactaagattggacctaagatacaaaactatgtatgtatattaacaactcaaaagaatccagagacaagttattagaattagtgagtttagcatgactgaataaatggtcaaaataggaaaaccaattttatttctgtataccagcaagagttagaaaataaaacattttaaaacaataccatttatggtagcataaaaattcaaatgtctggggaaaaatttaatgaaagatgtccatgacactttaaatattatttagagaaatgagagaagaggtaaataaacagaagtacataccatgtgaactgattagatgacccagtattttaaagatgtcaattctcccctgaattgacttataaactcaatgcaaccccgggcgcagtggctcacgcctgtaatcccagcactttgggaggctgaggcgggcagatcacgaggtcaggagatcgagaccatcctggttaacacggtgaaaccctgtctctactaaaaaaaaaaaaaaaaaaaaaaatacaaaaaattagccgggcgtggtggcgggcgcctgtagtcccagctactcgggaggctgaggcaggagaatggcatgaacccgggaggcggagcttgcagtgagccaagatcaggccactgcactccagcctgggcgacagagcaagactctgtctcaaaaaaaaaaaaaaaagaaatggaaaaagaaaaaaatctcaatgcaatcccaatcaaaatcacaacaggcttcatatatatatatatatatatatatatgtgtgtgtgtgtgtgtgtgtgtgtgtgtgtgtgtgtgtgtgtgtgagagagagagagagagagagagaagttgcatggttaggtggtaaaagcagtgtttgccataaaaatcaggtcgttggttattttggtggggagggagaggtagtgtttggaaggggacacaagggaaggttttgggacgcatggtataccggttgtcaatgtatggcctcgcacctccaaatccatcctttaatacctgctctgtgggcacagccagaatccccttccgcggctcccctcgcggcagggaggatgctgaacagtagagggcgctggagacacgctgcgggaggctgtcgctcgggtccggctgcgggccacaggccgcggatcgcgctctgccagcgccccacgcccgcaagcgcggcccctccgccacctcgcggcccggcctgacctgttaatcacgtccccacggctctcctagcggggacaccgccgtctgcaggctccgtccccacagtgcccagaccccgggaagtttgtcagtcagcaccctgatgccagccgattctcaaaaagccaggaggatccaagcagatgatttgccagacggtactgcagcaatggagatgaacagataattcacacagaaagaaggacggtagggagagacgtgcggggggtagggagggcggaaggaaggtctaggggaaggagcggagggggaagggaggaaggaaggcagcaatggaatgaaaggagaagggaggaaggactcgttgaatgcacagcctccccggtgctgcaccgacaggagcggctctcacaggcatggggcccccaacagaccctaccaggctgcgggaatgttgcggccctgcagggcgtctctgtcttttttgaggtgtctctggtaatatgtgataatgacagtatttttagacatttggaatctgatttaaattttagctccatcaccttctagctgtgggaccctgagaaacagcacatcctcccggatcctcccatctctcttgtccacacgtggggaaggctcctggtgggggggggttgggggggaggggggaagggggggttggggggagggggaaggggggggccttgcagatttaccaagctgatgtacaaagacctactacagcggtaagggctagctcctttctcccactctggcagtcactccactttgagaaacatacatcttgaaataaagctacaagtggagaggggcaggtgatttgggcaaatgattccatactaaatgttaggacaaaacatcctaggcaaatatcacaatccggcgtcatagtggcatactaaattcaaccaagaaatatacccatgatgttgaaagagccaggcttatggaatgtaaacagcaaactattttattcttgttttctatttaccaattcaaacttactctgcaggtcactcctccctgcccctgggataaaatctagggcatgttctgtgactttctggatcacaaaattcacatgatttttggatcattctcagttaaccaaaaatgtgtcctgtaacttctagctataaaaataggctctgttcagcatttaaaatgtccaatcccatgtaggagtctaaactttcgatttcattttaagtttaagcttcctcttgattcctcccccaagtctggcccaggcttgcatttggctccaggcattgggcgggtagcagtgtttcctctccatttttcactttcactcttccctccccaactagcttgcagggatttctgatcacctagtagagtctagaggcgtaagggaaggaggtcaccaaggggcaggccaggctttatgtgaatagtgctgttgtgagccaagtacttgagtacttcgaggtccccttctactgcagacatcttccctatggttcctgtgacccaggtttgtctcagagtggggttagcacacggtaccatctccatcccctttaaaagtatttattacatttttctggaaatggaagtctgggaattatatttccctgatagtcttatgagcaggattccaggttgattctgccaaatgtgaggcactcaggtgagactagaaagcagaaagatggtttaaaaaatcatcgttttcttcctttgactctgcacttatgacagcaggatgctcgagactcttgcagtaatttgggcaaagatttccacagtgcaaaatagaaaaaacgtaactggcaaatagctgtacaaattacagtccattttcatcatggaatgtcagtttggcaacaatggcatcgaggcccaaaagcagctctgcagtaggggggttcctccttggtgactggatgggcacagcgaagcacaaattcctgaagatcccagctccaggaaacatcagcatggttcattgcgttgtccacctgaattcttcacccctccctgtggctgtgtccattgccctgtagtgttgcagttcccctcaggaaaaagatatcatttacttctctgacccttgatttggagcttggctatgtgacgtgctttggccaatgggatattggatgacataacataaggagagacacagatatgcatctgcacaatgcagcttgcctttttatgcttctgccttcaccatgaaaagagctttccctgggggtagcagctgtccctgcagcctgtgttcagaatgcacaaatgtgaggagccaagcccagccagcttgaaagtgagttgccaggcccagcgcagtggctcacacctgtaatcccagcactttgggaggccgagacaggcagatcacctgaggtccggagttcgagacgagcctgaccaacatggagaaacccccgtttctactaaaaaatacaaaattaggcctggcgcagtggctcacgcctgtaatctcagcactttgggaggccgaggcaggcggattacctgaggtcgggagttcgagatcagcctggccaacatggagaaaccccgtttctactaaaaatacaaaagtagccgggcgtggtggcacatgcctgtaatcccagctacttgggaggctgaggcaggagaatcgcttgaacctgggaggcagaggttgcggtgagccgagatcacgccattgcactccagcctgggcaacaagagcaaaactccgttgaaagaaagaaaggaaagaaaggaaggaaggcagacaaaattagccgggcgtggtagcgcatgcctgtaatcccagctactcaggagactgaggcaggagaatcacttgaacctgggaggcggaggttgcagtgagctgagatggcgccactgcactccagcctgggcaacaagagtgaaaccctaaaaaaaaaaaaaaaagtgagttgcctaccctagctcagaccacctccagccaacccacagatgtgttagaaatgagtgcttatttaagtatggcattgacatgttgtgattagttgttatgcaccattatagcaaaaaaattgcacactgataaaagtaactgttccctcgttggcttcaccagctttcccaagaattgtttaatcccattccctgtataaaatcactctctgctgagaatcctttttctgagaaaagaattctgagaattttttttctgcttgaggcagaccaacactcattccaagaacaactggaaaggctgaataaaacacagaaaacttttttaaaaagtttttggaaagcttcccagttaacaaacatttgaagggtcataatctcaaaagaagaaaaacacaaggaggcaagctggccctctgtgaactacttttcccttcaggaaacgtgctgattttagctaagaggccgagcatttgggcagacggccatagctaagaggcagcaaaggcagcagagtcgtcttcagctggagagacaagaaatggagactgaggttgtcaaggcagctggaactgaaggggccgagatatcatgtagaagggagacacagaaaaggaacactttccccttgaggcatctgctgagttaagctatgcagaaaggctatgaaaagcagcaggttttggcagtgtcatattaatgagataaaagttggagttcaggacccaccaaggaaaagaagcctaataatcacatcagacactcagttggaatccttggaggaccacactctagatagacgggcaaaccagagatggagatgaagccttccaaaaactgcaacatagactctagtcagttcggtaccattggattaaggtaaaatcttcccactctgtctatcagatgacatggtaaaccctcccttgagacagacattgttttcagatcatgtttcctggagccactaaaatttattataatggttagcattcaacaataagtgatcaaacacaccacaaaacaggaaggaggggaaaacagacacaacaaaacggagccactaatgacccagatattggtgttatcagacacagacttgatgggtggaatagagactttcatcaaagaactggaatctataagaaagaatgaaatggaaatttaaaacttaaaaatacaataattgaaattaactacttagcatatgggttaactacaattagatttagcagaaggaacattctttgaactgtaatataggacagaataaaaactctaagctgaagaacagagacaaagagtatggaaaatacagcaaagaacataagatacttgtgggaggtggtgaacaggcctaacacatatgtaactggagtcttagaagggaggaagatggggcagaaggaacagttaaataaatatagcctgagaactttccaaaactgataaagctttatgatccccaagcaggataaataaaaacaaaactgcatccaggcacactatactttttttttattattattttttgagacggagtttttctttgtcacccaggctggagtacggtggcgcgcgatctcagctcactgcaacctccgcctccccaaggtcaagcgattctcctgcctcagtctcccgaatagctgggattacaggcacgcgccaccatgcctggctaatttttggattttttagtggagacggggtttcaccatgttggccaggttggtctcaaacttctgacctcaggtgatccactggccttggcctcccaaactgctgggattataggcgtgagccaccgcacccaacccaggcacactatacttaaactgctgcaaatgaaagacaaggaaaaaacagtaaaagcagctagaggcaggtaggagggacacatttcttcttttcttttttcttttcccctccctccctctctcctccttcctgcctccctcctgtcattttcttttgtagaggggggggatcttgctctgttgcctgggctggttttgaactcctgggctcaagggtgctgggatgacgggcgtgagccagtgcatgttactgacacattactctcaaaggagaaacaatagcactgaaaatcacttgtcaacagaaatgatggaagtgagaagataatggagtgccattctgaagttcctcaaagaaaaaagtgtcaacctgtaatcctatattcacaaaatatacttaaaaatgaatttgaaatagatgtttctattcaaaaactgagaaaggctgggtgaggtggcctgtaatcccagtcctttgggaggtcaaagcaggcagactgtttgagctctggagtttgagaccagcctgagcaacatggtgaaatcccttctctacaaaaaatacaaaagaattagccaggtatggtggtgcctgcctgtagtcccgctactcgggaggctgaggtgggaggactgcttgaacctaggaggttgaggctacagtgaaccatgatcatgccactgcactccagcctgggcgacagagtgagaccctgtctcaaaaacaagcaaacaaaaaaacacaaaaaaacctgagaaaatttgctgccagcagatgtgcatacacaaaaaatactaaagggaattcttcaggtagaagaaaactgatctatgatagaatcacagaaatgcaggaaataataaaaaaaaacagagtgaatatgtgggtgaatacaaatgaatattgactgcacatagcaataataataatgtctcgttaggtgtaaaatatatgtgaaattaaaatgagtaataataatatacatgcaagagtagaatggaggtaaatagagattgagtattgtgagatcatagcattgtctgggaaacaataaaaagtaaaatttgtattagattataataatgtacagaagttgtaatctgtggaggaaaccactaaagaaattataaaagaatgtgtaagtagaaccaatggtagggggggaaacggaattaaaaaaataatcagaaagaaagcaacagaaaagaaaaaataaaaacaaaaatgggtaagacaaatggaaacaagtagtaagatggtatttatgaacacaactatatcagtaattacaataaatgtaaattcacgaaatacacaaaagacaaaatttgacagacttgattaaaacaactctattcaagagacatgacatcattataagaacattgaaaattcaaaaataagggggaaagtgaaaaaaataccattgtgagtggtagagaaagccatttcacataataaaggttcactctaccagaaaacgtcaattttaaatgggtatgagcctaataacacaacctctaaatgcataaaacaaaaactaacaaaactcaaaggagaaataaacaaattcataataacagtggcaggctttatcctctctcagtaatttatagaaaaacagacaaaaatatcagtaaagatgtagataatttgaccaacctgattaacaaacttgacccagttgaaatacacataacacctgcacacaactgcagaatgcacattctttcaagtgcaagaacattatgataagaatattataggaaagtctgtcataaacatagcttatataaaaatataacagcaaattaatctaaattttatttatttatttacttattttatttttttgtttatacttatgtcataaacatagtttatataaaaatataacagcaaattgatctaaattttatttatttatttatttacttattttatttttggagacagagtctcgctttgttatccaagctgtagtgcagtggcgtgaacatgactcacttcagccttaacctcccgggctcacgcaatactcctgccccagccctccaagtagctgggacaacaggcatgtgacaccatacctggctaatttttgtggtttttgtagagaccgagtttcaccacgttggtctcaaattcctgagcttagacaatctacctgccttggccttccaaagtgcggggataatagatgtgagccactgagctcgacttaaatctaaattttattttattttattttatggccatgctccctctaataaatctaaattttaaataaataagtccaagtattgttgtgtttatgtgtataaacctgcgcacacacacaaaagtgtacacaccctgctggtttctattacaagaatgttaagtttggtttgacattcaacagtcaattagtataagtcatcacatccaaagaataaaggagaaaaataaaattatttcaaaaggtgcagagtaagtatttgagagaaatttaaccttatttgtaattaaaaaaatctttttaacagcttgagaatatatgttaatgagtacattaaaaatcctataacaaccatcaaacttcatggtgaatattgacaactctccacatgccacacccaccacccctgagattgaggatgagacaagaatacccactatcactacttatagtcagcattctgctggaggtcctagccactgcaatttgtataccaattttatatcttgcaaccttgccaaacttattagctctagtagtttttttgtgtgtggattccttaggattttccatagacaagattatgtcatgtgcagatatagttttacttctttctttatgatctggatcacttttatttctttatcttgtccaattgctcagccactgcagtttggcaagagctaaataaggcataaagattaagaaaggaagaaataaaactgtcattcacagaggacatgattatacaaaaataatctgcaaattattacaatttaaatgaatgtcacaaagcctctcactggataacaaggtcaacatagttttgtagcaacagaatctgtatatactagccataaacaaatataaaacgtctaagaataaatctattgaaggatgtgcaagaacactttactgaaaaccacaaaaatagttctgagaaacatacaaaagacttaaagtgaagagatataccatgttaatgaataggaagattgaatattttaatgatgtcaaatggcccccaaattgttctacataatcaattaaatccaatcaaattctagcactttattttgtggaaattgactagctgattctaaagtgttttatggaaatgtaaagggcttctttcttctggagttgccttgtggacaggatttgagacaacccaggccaggtttctctggtccatgggaagcatgcgtatgctttttgccctgactatgtctgtagagaacagcccaaacaacaacctcctccccatcagagcagagagccagctagtctcttgccatttagatttttcagggatgagtcagagataccagtctactctgtcctgcagaaaaggatacttatcaacttttccaagcggccctagaaaagtcactgctagtcagaaatctcaccttggaatgtgggggtggctggcatctatccggatgtcagatgaaacagaaacagttccactgtagtagcctgctctataaacacacagagaacccctattacatgtgagctatgaagctattagaaactacagctttgcggactactttgaaaatgtgcaagtgggccgggcgtggtggctcacgcctgtaatcccagcactttgggaggccgaggcgggtagatcatgaggtcaggagatcgagaccatcctggctaacacagtgaaaccccgtctctacttgaaaatacaaaaaattagcagggcgtggtggcaggtgtctgtagtcccagctactccggaggctgaggcaggacagtggtgtaagtaaacccgggaggcggagcttgcagtaagcctagatcgcgccaccgcactccagcctgggcgacagagcaagactccatctcaaaaaacaaacaaacaaacaaacaaacaaacaaaaaatgtgcaagtgaaataagtgacaaaaagcaaacacaagatattctgttcatacgaaacactgcgaggcgacacttgtgtttgtagattgacagaaattggaggtggagttaaagaggtagaaactcagtataacattcattgcctcttttgctaaagttgtttcactgcataagaaaaagatactggtcgggctgggtgcggtgactcatgcctgtaatcccagcactttgggaggctgaggcaggtggatcacctgaggccaggaatttgagaccagcctagccaacatggtaaaattccgtctctactaaaaataaaaaaaattagccaggcatggtggcgggcgccagtaatcccagctacttgggaggctgaggcaggagaatcgcttgaacctgggaggtggagggtgcagtgagccgagatcacgccattgcactccagcctgggtgacaagagggaaactccgtctcaaaaaattaaaataaaaaaaaaaaaaagaaaaagaaggaaaaaagagaaagagatagtggttccatgtgctgttctagttacacaaaacaacgtgttgacgtgcaggctgcacgatgccaggtgcaaatacacactacctgttacagtaactgtgacaagcacaagggctgctcactagcttgagtgcaacttctggggagttgatggcagtgatctgtgggtacttccttcttaacaaattttacatcaatactgcaacacagcaatctcagccctgtgggctataccatagccacatgctttcaccatttcctgctcaaagggagagcccaggaactgaatgctcttaatcagggagagcacagaaacagcagcagaacagctggagaaccagggctgtgtggttttggactgtggggagggtgggccatgggcagacttgacacaatgtgggagggcatttgacacagccccgtggaggacctaatgctcggggaggccttcacccagcacagtgagccatgccgacacttggtgcctgagtgcgctggtcacagcgccctccctgtgattttccccatagcagtgtgttttctctgccaggcagaaggcagagaaaccctggctgaaaaagcagtgagggtcatcgactgcatgaacacatcatcagctttcccagatggaggcacccaagtttaccctgcaggtccattcagcaggtagagctgggtcatcactaaacaggatctttcttctgagcatctgagattctggtccaaatcagggctgtgaggaccaggagccgggattccgagcccaggcagccccgcagataaggaggagggagtgtgtcggaaggctgtatggccagagccgctgaccgggccagggcttctttgtcccctcttctctcctgcatatcagcactcacgtcctcctggctcgggctggctggcagctcggggagctgttggatgaaacgtccatgcgtgtggctgtggctgtcacatgcaactgcgaggatggtcggctcccaaagcggaaccgcggtgctgggcgaagggtcagggctccgtggtgcggcagagcgcatgccagcgcttcaccagctccttgggcttgctgagcatctcgtcccagtgctccagctctctgccgcgggtgtacatgtaggggcccaccaccactcggcccagctgctggctctctgcaggggagggagagcaccggtgtgctcctgagcacagaagccccgtccccagtgacctcctttcctccctcctcctccccaggaggaagtagcaactcccctcctctctgagtgggagctgacaggccccaaaggggccctgcctttgctctgcagctggaagggctgcttctccccctgggagattgggaggaaggagagccctgaaagactctctccttgagggccaccagctctgccccacacccttctgtggggccgtattaagtctaccttatgccaaagagctgagggaggaaagggcccctctagaaagaaggcctcggccatccgagagtacattcagcagtaacattcactggccaccgtggagaagggtcttaagtccaggccatgtggccagccacggcctgatggctctgtttccccagagtggcagtgggtgctggggtgtggggcagtgtgggagctggctgacagaactcgcccagaaccccaaagtctcatctggagggcacgaggaaggtcagagcaccaggtccctgggctggtggcaggcctggcccctcccactctctcgggtgatttgctccaggagagggcagcagaggccattgcttaacctctttctttttcttttcttttcttttttttttttttgacagagtctcgctctgtggacaggctggagtgcagttgcaagatcttggctcactgcaacctctgcctcccgggttcaagtgattcttctgcttcagcctcccgagtagttgggcctacaggcgtgcaccaccacgcctagctaacttttgtatttttagtacagacggaattttactatgttggccaggatggtcttgatctcttgacgtcgtgatccacccctctcggtctcccaaagtgctaggattataggcgtgagccaccgcacccagccaacctctttttttttttttgagacgaagtctcgctctgttgcccaggctggaatgcagtggtgcgatctcggctcactgcaagctccgcctcccaggctcatgccattctcctgcctcagcctcccaagtagctgggactacaggcaccagccaccacacccagctaattttttgtatttttagtagagacgtggtttcactgtgttagccaggacggtctcgatctcctgacctcgtgatctgcctacctcggccttccaaagtgctgggattacaggtgtgagccaccgtgcccggcccttttttttttttttttttttttgacagattcagcagcctcgcctcctgggttcaagagatcctcccacctcaacctcccaagtagctgggattacaggggtgtgccaccacgcccagctaattattgtatttttagtagagatgagcgtttcaccatgttggccaggctggtcttgaactcctgagctcaagtgatccacccaccttggcctcccaaggtgctgggattacagatgtgagccagcatgcccggctgcttaacctgtttctagggtgccacagacagagctcaactggactaaagctgggcctgaaacccaggccttgggcaatatttcagcctttctgagcactagtttccttaaccagggagggagctcgtacagctccttctgaggtcaggacaggaggcactcactctgcctgaacactcggcagcccctcgtggtccccatcccagcagcccagggtagggtgtggccttactgtccccttccatgttctgcaccacagtcaggctgaggctagcggtatccagctcggtggcatcggccttgaagctgaaggtctcattgtacacagggttgatggagcccagcacagctgaagtcttcttgcacttgacaaacttgttgtggttcatcagagacactttgacaaacacacctagggaacggtgagcactagtgggctggcagaggcaggtgggagcagagcccctgcctgtgggaggtccggctaggagggcacgtgcccaagctaggtgccagggccccacccctcacacagtgctgcggccccgccggcgtgaccagaggaagccggctgaggagtgcactgccctgcggcccaggcggggctccgctcccttccttttccttcctctttgcatcaggaaagtacccacggctcctgcaggccctggtttaccagagcctagcaccgcaagcctgtccctccctgttggggggctgctcactgggcccccaggccccctggggccccttaaacaccttgtacagagggctaagatttggtgggtgagggtcagagtcacagtggaaggtctggatcctgcctggcttacggtgaccccagatgtgaacacaaacaggtggctgaccaccacctcactgggatgggtgggatgtgtggggtgagcccaaatggggtgggacatgtggggtgaaccaaggcctccccttctgcagctcctgtattctgggaggccaagcatcagtgcccattgagtcgggggctcttcccctgtggggagggaggtgcgggcctcaccctggaggaactggacccatgccgctgatggaaaggtggaggtggaggcaggcaggacagttcaaagagccaagacgctgcctcgggaaacaggaggggcagggcctggtattgcggctgggttagaaccctccgtaggggaggccaaggagatgcagctttgggttcaacacaggaagaggcttcctgcaccagaactgtcgaccgagggacagcacgtcttgtgaggtagtgagcgctccatgataggtgtatgcaagcagaaactggatggtcagggatgaggttggactgtagccccaggctgtaagctcggtgggtgggaccttccccaggaggaaagggaggaactcactgacaatgcctctgtcctcctggagccggaggcccttggcacgcagcacaaccaccgtcaggcggctcaggtagtcgttgtagctgaggcagaactggaggtcgccaaactccgaggggggctggggaggccaagatggaagcaccccaccctgttactctggcaagtgctgaaggggtcacagaacccccagagagcctcccgcttcctcctagcggtccatgcgacacacccgcatggtcccctttgagttccactgccattttaaggatggggcaactgtggtctggagagtttaaggggcttgtgcagtcctgtggaccagagctaaggagtcacacccaggtctgagccagctggggccttcctgggggtggtgggctggaggaaacatttccctgggctggaccatttgtggtgtcatctctcacagctgtctaacctagataagaatccaaatgtggatatttcaggttgctccagggggtctgatggccagtgtgacaacaggacctcaagcaggccctccctgcccaggggcaggtccgttcccacctgtcccatgctgcttggggcctgggccctcctccctgagtcactgttgtagggtggtgtgcaggatgctgagggctgatgccgccagcaggtgctgggccctgtgcacacctgccagctgatgctcagtggcataggcatggtgaccttgaccatacctccaggctctcggcctccaggtctctccagatgacacgccggcagtcccccactagggtctcattcttcaaggggaagagcacctggcccaggagctggtgcttcctctgcctgtccacgtggtagacggagaacttcagcaccctctgggtgatggtcttgctggacacctgggggggacaaggacaccagccagagtcaggcgtgggggtaggggatgggatggtgtgacttgttattctggacatgggtgcttttgggaacgggtgtctcaaccagggacccacatcccccaaacctaggcattttcaggggacccttctcagcagcagagccgtgtacccctggaaagtgggggtaggtgccaggaccttggtacacagagtgtggtccgaggacctgtagcgtctaccaccacttggagccctgttagaaatgcaggatcttgggccccagcccagattcatgaattggaatctgccgtttaaccggagcaccaagtgacatggctgcacggtgagtgtggctccgccaccaccctgcactgtagcaaaggcccaggagcccagggcaccggcctgtctctgctgtcagagctgggcatgccagctctctcctccctgagatttggcctcctcgcctgtgaaatggggattatgggtcttcctctctggttgtaaaaccccaatcacagtgtctgacctccagcagatggcccattaatattgattttcttttctttccccttctcccttttccacagagggattggatcaagctggggcgagatagagtggggaagtgatgagctaagaaaaattagcctgcaagcatgacgtgtcgcacgtcagcaaggctgcagccttggattctgatgtcttgagaagagcgattcacctgtgaattctcacagccctggcctcagaaagacggcccgggaccaggcccgatggcacccctcttcccagctctcagccagggcggaaggcacaagtgatggccctggcctccgcagtcacactcctcctgaaagctgactggctgaacctcacctcttggctagcttgccacccagctcttgagaacatgtttgtccaaggcctcttggcaggtctcgatgactccttcccctaagggcccccagtcacctgctaaggctcccaggcccctgtgaaactggctcggtgccccaatagactctccacctccagaccctaagccggccagcccagagtgcagcaaggcaccacacctaccctgtgagggcactcgggccccgcgctggcctctgacagcacaggaagcttctgcattcacgctgaggcctgtcttttgccttccttagataaacttgccagaaaccccatagtgcttcaggcctttgggataattcccctgagccccataggccagggcctggcattcagtagttgctctaaaattgtgttttcacccactctcttccaggtagtcaggacagggaagcccaggcttctggtcaccactcaccaaatctctcccctgcccctctatcagggatcagctcctataggccttaacctagcagactaggtaaagcagagctggtggcatcaagggtcccgggggctgcagagccctggctggtacaggaggctgggctctcctgtaggtctgcaccttcccagcaacgcggagggcaccagaccctgcctgctccagaggctgtacctgaaagatgaagtgctcgtcaaactgcgggttggaggttttgcgtttggtcttggattggaggaagcgccgctcatcgggcagcaggtagagcttcaccagggggctgcaggtctccgagggggcttgcaggtgctgtgccttgatcaagcccaccagcagccgctcagcctcctgctcatattccaccgagaaccacagccgccccaggcagccgtcggggaagtcggtctcacttttgtcctccgggaacttgtacagctctgggttgatggcccccaccatacatgcatctcctatgacagagggtgggagggctggcaggccagaggaaggcaggggcatgggagacagtggcaagctctgggcacccatccccatcctggcccatccgtctctgctgagcctcagctagcctgaccacatctgccccactctcctcaccaggctaaacacatcccctctctctggtgcagctcctccaagaagccttctcaccatgaaggcattgcatggccaggctggggatccagcagagtcctgccccctgggattggcccccatccttggaggtcaggacctgtttcaaggacacagtgcccatcacctggcctagcccccttccatggcgtctagggaatgactcagcgataaaacattgcctttcttcttcctcttcaaattagaagggccaaggtgattattgggtggttcctgtgatggtctcttggtagatcttcagggcaaagaggtggcagaaagctgtgtttgcagcccctaccattctgtcctcttggtcaaccaacccatcatcctagagtgggacccagcacaagttctgtacatggcgtgcctgggttccaattccaatctgttgcttacagcctcagttaagactatgtaaaatggggtgataattcctccccctcagagtcatggtgaggtctcactccaaatcagcacccaaggccatatcttaccctcatggggtgcagcaagcacttcataaatgaaagcacccagaaagagtggtccctgggtggtccctggcatccctggctggttcaggttgtgttccggagccaagctggtgaaagcagatggggccacccgagcagaccctgacctctgggcagccctggcaaggacactcaccaaggccgccgctggaggtgtgaggcagcagctctgatgccgggcaggggtcccatggggcatcggcccactctccactgtgcaggggcacccaatctcggccttgaagggttgggggcaccacgaatggcacagctggtggcctgtccagagtcagggagacaacatgtaggtggcaagtcaatggtgtggtctcagagcgctcagccaggacggttgagcaccaggggctggaggaagaaaagccatcgggagccaggaggaggccagggcaccattttctgggcccataccaggcaacacacacacacacacacgcacacacacacacacacacacacacacacacacacacagcagtgggatttgaagaaggaacacagcacctgacagtgtcagccagtctgggtttggattcctgttctgccacttactaattgtgttctctggacctgttgcttatgtgcactgagcctcagattcctcacctggaacatgggtttcataacacctgcctaatagctgatgtgaggtttctggggtttctttgtgatagctcccagcaccgaagcagcatagaagaggcacccccataaacagaactttccttttcgaccccaccctgagggaaattccaggggcgcacttggccccacatcctgcctcacctgctcagttgggtcctagcatgcggctggcagggcctgtcccgctgcccactggaggcagctgtggtggccatggctggtgtcccaggcagctcctcataggtgagggtggcacagaaccttctccacagacagcagcttgccccgatcaacagcagcagcagcagccccccgatggtgcccccaatcaccagggccagctgctctgggggcagagaccaccagtactatgatgcctgcctgggaaagccactctccctcacagccctggcctgctggggcagaactagggcagcaaccctgcctctgggtttgatctcaggagtgataggagcaggcctgctggggatgggttccgggagggatgctgctggctaggttccgccagctctcagaggagaagccgtttaccccagggtctgagagccctgggcagaaccttctagttttccttggaaaacagctggccctgcccttgggattctggcttaaagaagccatttccttgcgcttctgagtagaaatcaaacctgccctcaccagaacctccatatcccctgggctcctgttgaggccaggaggggagctggggtgtggacgcagtcagttaaggaaagccctgaaaggtaccttccccctggtctgcaatcaaacctctaccctctggggccctggaacctgctgcaaggctggactcttctctaacacccgctccctcccctagccctctatcaaggtgagcacgcgcttaggggagttggtgcgacgcggtggacgaggtggggaggaaaagggggcaagaccccgttgctgctggccctcacacgtccgcatttgcgggacctaggaggcttcgccccgggggtgctcagacgctgggttccaaccgctggccacctggggcgggccaaaaaggtgcctcccttagggtgacgtgcggccgcggggcattcaggtctcagggatctgcactgggtggggtggtgagaaggccggaccccccacacctcctaagccgcaactgaccgcgaagagcgggcctcagcgtctactccatcccagtgcccctccaagagcgcgccgaggccgggcagggcaggcgctgcaccccagcgggggcggcggggcggaggcaagtgctggaagggtcgcagaggggccggggctgggctggggaggcgaggctcgcttacccgccatggggctgctcccgcaggctggtctcgccggtctgggcggctggggctgggctgccaggccgtctcttaaagcgccgcggggcgccgtcgggcgagcacaggggcggtccgtggtgctgctggtgcccagctgcggcgcggggagccgcgcagtgcacggcaggggcagggacccagcgccccgaggccgcagtcccgccccagcccgtccctggcccaggcccaggcccggcggtggaggggcgcagagccgaccgtgagctcccggaaaccgcagggctccagccagggcgggtcccgggcgccaggggcgccaggggctccctgcggcttggggcagggtggggtgagagtaccacccccatcccggagagcagggctacagccttcaccgccgcgtctgacacagggctccgcacccgacccctcacacctggtggccaggactgagcccccgccctcccagatcctcctcaagccgaggcccctccagccgcagctccgaccccggctcgggggagccttcccggatcccggggtggagtctccgcgcgggtccccggccccagcgctgcctgcctgatggccttgggcagggatgcggcgctcgcgcacccgttcgctctcagcggacaaaccggtcgagagcgcaattctggagcgggttccagaagctcctgggttccaattcaggctcctcactcgccagccctgcgatttgggacaacttaacgttcgtaagctgggttcagtcttctcaattgggttaatgtccgtgaggggctctcgtaagggcggctggcctgccggtaacttaagaagcatgtaaagagcacttagagcggaggagcggcgcggcccagcccctgttacggtggttatcggatggaggccagcgtcgcctgggtcccctctgtacacccagcgcctattattatggtgattattagaacgcagggcccgtgcccactagtccaggctggcgaacgcgccttgcgggaaaggcgggagtaaggtcgctgcgtgtcctctctggtcacacctcggcgcgccctggtcgcgcccctatggttcccccgccgaggcctcgaggcgtctgagtggggagcgaaaggaatgtgtgtatctgtggtgcaggggagtgtgtgtgtgtggggggggggagggggtggttgtgggggagtgcgtgttttggggggatggaccttctcgttttacagccttgaaggttatgtccagagtcatagcctgggtcccacacccccgcgtcacctgtgcctgtcctagggggcagtcagtgtgcgtgaggctccaccctgcctgggctttggctcacctaaggcgaggagggtggtgaactggggtgccccactgggccgggtctgggagccctcagcgccagggtgcagaggccgcagccactccccttctagggtctgggcggtgggggcatgagaaggcggagacccaggccacttcacccagtaactgtcctcagctgtgcgcttaactggcgagatctccgctctacttggagacagtctggggtgtctggagaatcctcccccacttctgcttaccccaggtcgctgtgggagcaggtgtctcaggaaatggggcctgggtcccacccaaggcctcgggtctgagttagatgtctgtatgtttgttgttgcccctgcaacaaagtaccacagattgagtagtttaagccacatgcatgttatctcacagttcggggggtcgggaatctaaactgggttggcagggcctgtgccttctggaggcaagggagctgtttcccagcgtttccagctcctagaggctgctagctagtggccctttcctttgtcttcaaagccggcagcacagccttttctaacctctcccactccaggtcatttcacatcaactctttctgcctccctcttgtaagtgtgataccctaccttgttttaacctgaattgactgtcccttagctgagagagccagacacactccattttggctccttcacttgcagccccttacccaccccccttcctcaaggacttaacttgtgcaagctgactcccagcacatcaaagaatgcaattaatggataagatactgtggcaagctatatccgcagttcccaggaatttgcccagttgatagtaccctaagcccccacatttgtgtccggttgatggtacccaaagcccccgcatctatcgccttgtgatggatttaaaacccctgcacctggaactgtttgttttcctgtaaccatttgtcttttaactttttgcctgttttgcttctgtaagagtgcttcagctaggctcctcctcccctttctaaaccaaagtataaaagaaaatctagccctttcttcagggccgagagaattttgagcactagccgtctctcggttgccggctaataaaggacttctgaattcatctcagagtgtggcgtttctctataagaggctcatcagataatccaggataaccaccacccccatctcaagatcattaacttaatcacacctgcaaagccccttttgctatgtagtcacggggttggggatgaggacttgatatctctaggaccattgtgtggaccatgttgtccatgcagtaccctgggaggggtggcttacatttccccttcctctgtctagagttcagtgtgcctcaacactggactcaggcagctagcaaggctcaggggacccctacatggaacccgtcagctatcttgaccccttcccccagctgccatgcacccccacctgaccaccccaatggggcatggcatccacaccagctgcctccatgattgcgcccgagctgtactcaggctgttctgggggtggagttgggtagtgggatgttttttgaaaagggaatcccttctggcacttcctgagtgccaggcccagagctgccatctctcgacccccatgctgtgcttttccaaagtccccatctttctctgtgtcaccaagtcctgacagctgttcctcctctgtccatctctatcatggcaaaaaaccttgcccagccctccatcacctctcatctggagctctgcatgggcctcctctcagctcttcagattccatgctgcacccactccccttcccagctgttgtcttccaggctcccctcccattctcatcccccccaccacccatctctatgcagtgcttgtgcccagactgatgcagctacttccacggctctgcgtatgcactgggctctcccaccatgctgctctctccctgtctgaaatactcaatgcccctcccaccctccttctccactgctcatgtttcaagatgaacccccagcatcttgccttctgtgaaacccttcatcatcccctccttgtcctcatggtccttgcagctaccatgccgaatatgggactctgtgcctgagactgctgcctcactcttcctggcagccgagggcctccatgaaggcagggggccgtgtcttattcagcttggcatcgccactatccacctccagggctgaggctgtgctgaatggcagatgaagggctcttgccattgggatgagctgccccagcttctgcccacattgtccatgcatcatacacatcctgggctcacaatttagggcccaacaggagctccctgccctggtcctgcagaccagcttctggggtctgcaaaatcacgttgtcagctctatctgcaaaatccttacactgccagccagcccactgagttttgagtcaatcttcctccacgggaagataaaagcaggtggcaggagggagctcatccttcttgctgctcctgatgttctgagcattgagatgcaggcctgatgtacacgatcccatggagccctgcctcatgtctgccctgcagggtcatgacctcctcctcagatgaggaaactgaatcaaagaggtttcctggcccacccactaagtggtggatctaggcctggcacctggctccctcgttccttcttcaccagtgagcagctgtagggcaaggacccaggagaccctctcctgtggcgctgaccgtgaatcaggcaaagagccacaggcactttgggcagcctcccctccatccactgcccgggggctctgagacctggctggcctggagccagctccccagaacagaaaggcatccagggtctggcagcagctctggctctgcttcctgttttcagaccttgttcttccccgtgtctgtggagctgggaagcctggaaacagcagcagacatgggttctgtctttcatggccaagcggaagttttatttccatggcaaaagcacttccaaggagggctgcaggaagtccaagagtttaaagacctgcaaatgcctgcaggtgattaataattcattgcagcagatgattacgagaaaggccactttcaattaaccttaagaatcatccctgtctaaggaagtgtcatctctcatcactgaggaacacagaggccatagcaggataaaggccacgctgagaagcatgtggaagactgtgtttctcaattcatgcaaattgcaccaggtcagcccaggtccttctttgtgaggagggggagggttcccctgccagcatcctgtctgctctttggttctgctatggcggcctcagacttaatttcctccagccccttcttttgaggagcttggagggagtatctttccttgttggatcagaacttctcgtcccccactgaaacatgctggctccaaattgtgtctcctcctgcagacagtcactccgactggcagggtgggcttgggcctgtggctcgctcctgcccctgggcgtggtttctgcttcctgccctgctgctcccctgcctggcaggcctgctcccctgcctcctctcaaccagcaccagaactctgccttccctctggagggaacaacttccttccccttccctgtccacacagtacctggcactcccctactcacccctattctagcgctttgtccatgacccaggcctggctgctcagcctagttcatttctggctgcagtgataggttcagggatgtccctgtgaccccaccccctgcccccgcgagaggctaatcaggatcaacactggaattttgtgggatgtactggggaagagacacctcctttctggcaggagttgttgagcagaaggagctaagtctggggccatggaaagccccacgtggaggagccagagaggatggagccagcacaggtgctgaggtggggacctatgttgtcctggcagcccctgcatcctgctgcatgcagcccctgcccctggaggggtggagagagagggcggcagaggggagtgagcccgccaaggccactgtgttagcaaggagctgagccggcgttggcatcagctgttccagcttcagtctcttgaccaccaaggctgcccctcagcatggagcagaagtcaggaactgaggcaaggcttgtccttcctcaatcgtcacctctgggcactcagctgtcctaaagttttttgaccccccttagggatggggtcttttcagcaagggccatttgtggcaaacaacaattaatttactgctcagcctccatggctcactcctgcccctccgccagcttctgtgctaacaactgacccacatttttttttttcaggaacagcaatgtgctcagtcaccaggcatgcatccaatgagccataagagggcggaaagactttgttttttgatgtattaatatgctaaattgatgtgtcggttaagacatgaagaaattagctatcaaactccaaagagtggtgacagactaagacgcagatttccaaaggtggctgagaacctgctggacaactgtcccccagtgagaggaagggctgagagagtgagggagggaggggatttgccagattcctttcttgagggctggggctgtgatgtggactcccacctcctacggctggccagggctggggaggggggtgtgctcggggagggggctgtgctcaggtagagagggggcaggtggagcagaggacagcctcccctccagcccagagagttggggattcaactctgctctgagagcttgctttctgtcccctggagtttgggaggcagacggactgctggtggaggtgcacaggcaattgtggcttcttggttctgatgaagacagtaggcagctgctgtgttgggaagcagccaggctccctcagatgccagccaaaggtttgtggatcttgggcacatgacacgccactggtagtgcgagtgtggctcagagtgtgatggggaattgtcactgacatgtgcctggggacttgtcaggatgtggaatgtgtacatatttcccacaaccagacattggccatgtgaatgaaagagccggtgtgtgatcatctcagtcctgaccacaggccctacccagagggcatatgtagcacagtggaaggaagtaggaggtgaactttctaggggtagaggagggagcaagtggcttctgattcatttgctcaggtcaagggcactctggttctggagtgggtgtcaggggtgaaggatcgagggttcctttcaaagggcccatttgagcatgaaacctcttccagatctggagaggtaaggcatcttacgagaccgtcaagacagaactttccaaatccccttcccttcctctgctcatgctcttacctcagaagtctgctacgggcagtgagagaggagagaggaggctgaccatggcaccctctccaagggcagaggctgtctgtggctggccctcaccatgggagatggggagacttaactcaagtttgcagatttgattattacctaggtggcctttctgatgactgtcttgggactgcggggacagtggctagaagggaatgatctctgctgaatacctgctccttccaagtgtggcctccatagggagctcggggctctcacatgtcctcctttgttccctcaaatagatcccaagatcttgaacgagaccattttactgggctttagtgctcaaggctgaggtttcacttccataaaaaaatcagttaaaagtgctgagcctgtgggaaggctgttctttggttaccttctgtggtcaattaaacgattggtctcaagttctctcttccctgtactggtattgtactcccacagccttgcaacatggtgggtgcattagactgtttatattgcttataaaggaattcctgagactgggtaatttataaagaaaagaggtttaattggcttacagttctgcaggctgtaaaggaagcatggtgccagcatctgcttctggtgaggcctcaggaagcttctactcatggcagaaggtggaaggggagcaagtgtgtcaagtggcaagaaagggaacaagaaaagggatgcccacttttttaaactaccagatcttgcctgaactcagagcaataactcactcattactaaaaggaggcaccaagccattcatgagggatctgctcccatgatccaaatacctcccaccaggccccacctgcaacattggaagccacatttcaacatgagatttggaggggaaaaaacttccaaaccatatcagtgggacacatgcttccccatgatttgactttgagcatggccacatgacctgcttgggccactggaaagttggcagagatgatgcggcagaggctggaactgcaccgtgcggctggccttgctctcctgtgctttagccaaggcggtgagatgagcatggcccagggagagctggctccaggccaatgagtgctctgtggtgcaggtccaaaccccacctggagcctgagatcaaggagttcagcctgagccagcagaccccagccaacccacagacatggaagggaaaaataaatgcttctggatgatgccatagagactctgtaagcagcaaaagctgagcaaaacactgtcactctcttttgattcctttggtgagactagagctgtgagctggcagggccacaccccttgtcccctctccacatgcctcaaagttgtggctgaaggtggatgatcttgtcacttttccttactggctggccttggtcttctctggaccagcctctgctgctgtgggaggaataaagtgctaaggggtagtgggtttaggggaaagagagaaggcttgtgggggacatctgaggttttcacacagcatactttatccttcttttgttgcagtggtgccccagtcaaaagtgccctctgggaaagcccttccctcctcttgggtgtggttgactccaccctcttcttcttccagctgggcttgattcctccacaggtccctcctcctggctgcagagattggttcagggaaacacagagccaatgagctgcaaggctgatttttctgacaatgctggacagaggcaagggttcttcccgagggtcttgaatttaatgagagaatctcaaatgatgagaaaaaagctggtctgaggacagggtcagctgaataggtcgtacccagagaaagagagggagagagatactggatgctggtgatgggtgaatgagacaaggcatgaagctagaacaccacctggtttttcacttaggtgagcccacaaattccgatgtgtacttaatgccagcttgagtaggtatctgccatttgcaatcacaagtcttcaatgatacaagattgcccacctgctttgggccgtctgtggcccaaatttgtacctggccttattttagggacatacacctttcttgggtttgcacacacacatgtgtgtttacatttggacatagtagaacaaaataatttatataaggattttgaaatgctgaccaaataaataatctacaccaaatactttacttacgttgttttattcattcattctttttaaaaaattatttattctttacaaccaccatctatggcaggtttttttttttgttgttgttgttgttagatggagtttcgctcttgttgcccgggctggagtgcaatggcacgatctcagctcactgcaacctctgcctcccaggttcaagagattttcttgcctcagcctcctgagtagctgcgattacaggtgcccaccaccatgcctggctaatttttgtatttttagtagagatgtggttttaccatgttggccaggctgatcttgaactcctgacctcaggtgatctgcctgcctcggcctcccaagtgctgggattacaggcataagccaccatgcctggcctatggcaggtacttttatcacttaggaaatcttttggttacaatttacagtaaatctgactaaatctgactaaataagcctaaatagggcttacaccataagaagatttgctttcttatttcattagctctaagatgtcattgattgtgaaatgcaccactgttttgcaccactttctttgtataagcaaaacttgctgccaaaccatgaagccattctttactatcaaatcagatatgagaagtgacagtggtgtcagaatgtgaaaaaaaaaaggccttccttggaatggggagaaatggtgttacttagcaagacatttgtggttgggtagcctcagatttgacttggcagctcaacatcatcatctaagatccaggttccttggatgtgtcacctgctctgccaccttcaagtttcgagatggcttggtgtcttctaacaccaagttcaaaggcaggaaaagaaggaaaggaatctgatagggaaagtgtttatttcctcactcacatccctcatcttatcagaaagcctccggcacactgaccctccataccttgttgctcactggcgagacccacacacagccatgctggtttcaaggagaccaagaaagtgagtatctgaccttttcagtcctataatgggagactggttgaaggaagaggacataagaaatggctgtcaatgccacgggatttcaattccaattttacagatgagaaaactaaagctggaagaggttcggcaactcgcccaaggtcacacaactagaaatcggtcaaccccagatttgaatccagtgtcgaatgattcaaagttcttcccattgcaccataaatcatctgtacatgaaagaccgaagactgagaaacctcaaatacagagcaggtaaatagtaaggaacgtgtttggatgaaataccagaacacctgaccatcagtggatcagataggggtttattgttgttatgtagccagcaccccagagatcagcagcccagggtggcacagatgcttaagggtttcatcaagatcccaggctccctcatcatcctccttcaccttctggagtgtgtggtttctgtccttaagttcacagtatggctgctgcgtctcaaggcatcacatctagctttccaagaaacccctacctagtgattccctcttacatctcattggttagaacaaggtcacgtgtaactaaccccagatacaaggaagttacaaggaaaagtaaatatatttagctagacaattgtcatcccagtcaaaactggtgctctgttttggaagaagaggagagagaaattgggtagtggttgtcattagtgaagtgggtatttggccactatatttggttttctttcttctaggcagatggtacaacccttggggttagttaaggatgtgtaacttactttgatcaatgaaatgggagcagaagtgagatgtatcactttctagtggaagctttaaaagttggtgcataaaaagacacatgcacccatatgttcatcactgcgctattcatggtagcaaagacatggaatcaacccaggtgcccatcaatagtgggttggatagaaagaatgttgtgcatatacatcatggactactacacagccacaaaaagaaggaagacctgtcctttgcagcaatatggatgcagctagaaaccattatcctaagtgacttaacataggaacagaaaactatatactgcatgttctcacttgttaaatgagagctaaacattgggtacacatggtcataaaaatgggaacaacagacactggggaatacaagagaagagagggagggaggggggtcaagagtcgattaaaaactgcctattgtgtactatgctcctcttgagtgatggattcatttgtcctccaaacctcagcctcaaaatatacttttgtaacaacctgcacatgtaccctctgattctgaaataaaagtttaaaaaaagacagttggtacattgttccccaagttcttttccattgatgtgatgactgtaaaagcaaatgccaagagtcctccacgatgaacagagccctcttgccaaacctgtgataggcatagagcaagggtgggaaatagacttgtgtttagttaatccactgctatttttgtgaggtcgctattgcaacataacccagactatcctgacacaggtcggcaatcagcagtgtccacacatagtcctcaagcaaggtcatgatcagaccagggaggagccagggcctaagcctgaactggcataaacagtgccccaatttctccaaagtgaggactgtgccagtgggcctcaagacaagaattgggagtccacagctcccagacactggggaccccctcctatctggagctgcctggctgccacatatgagcctggtgacccagccacacccaccagctagctcatcagcagtgtccatgtcattatcgaggcagagaaatccactcagcgaggatttcccacgttagcccagcatccttacttctcgctcatagtaacagaaaccatgttcccgcctccaacagatgcactgtgctctgcactcccctggtcagcgggtgggtgcatgatgcaaactgggccagtcagatgctttcattctgaaacttgaatcttgagtgaaataagccagactcattggggactgattggaatttactcaccccggtggaggcacatggaagaggcccgttgggtcctgctatctatgtcctcagagcttcacttaccacagttcggagaggacagcacatcctccaggggttctgaacctgaatgcagcaactggttgagaacctgagttctgcgctgtcttctgttgcagtgggagtgagtagggttttggtggtatatggtataactgccttatcttgagaaagaatattttaacagctgtgtttatgtcaagaggggtatgtgtaacattcaacaaccaatgctgcagattgcagaggacatttgttgtttttgcctgctcagcatctattcttgctgcttctggtgacaaaattcagtggtcccatttctcttttaactccagagctagatttgatccagacctggccagtcagagcatcacatgctgcaggcctcagtgagtggttaggagctgggcagtggcctaccttagtttactatgacttgaacctggaatttgtgggcaacttttgggagccataataacagtaatggcagctgggctcacacctgtaatcccagcagtttgggaggccgaggtgggcagatcttttgaggtcaagagtttgagaccagcctggccaacatggtgaaaccctgtctctactaaaaatacaaaaatcagccaggcgtgatggtgggggcctgtaatcccagctactcaggaggctgaggcaggagaatcacttgaacctgggaggcagaggttgcagtgagccgagattgcgccactgcactccagcctgggcaatagagcgagcctcagtctcaaaaacaaaacaaaacaaaacaaaacaaaacagtaatggctagtacagttaacttggcactgtccttgttccttaaactcttgtccatggacttagagctgtgaggacataaacataatccaggagttcccaagacccactatgtagggagagcctggctaaaagagagaggtgccagttctgatgacatcatttaagctaggggctctggccaagcccggttaccctggactgttgacttacaagaaacagtgaaaagtccctttggtgcttaagccaatttgagttgggtttctgcctcttgaagtcagaagagtattgcctaatacaataattctgtgtaggcatacaagacacatcagtggtggtacctgccatgcccgcagccctagaggaggagacagccagcaggtggccctattttagatcatgtaacagttggacaagagcaagcaaacacctgactcaggctctgaatcaggctggtcaggatttgtgagttttcctctggcattaaagatgacctatgtctatccaatttctcttttttaaattggaagttgagaaacagggcaggagcgagacagccagctgcaagggaagaagcatgaaggatatgtgaagaggtgccactaggaggagctggcgtggtggcaactcagtttcaaagcagcagaaattcagcatcaggagagggcgccagttggtggaaagagctggcagagcacagtcaggaggaaacctgtctaggaagctccatgaagagagggagcaatggctatttctgaagttgtctcgcctattcctgaggacttttcaattctggttcaaatcctcatgcatccttataacaaacccattttttcccccaaacaagttgcaggtggtctgagaccaaagcagacatcccccttccatgttgcctctgtaaccctcccacggtgaccagcgtatcactaaggacacttttggtagcaaaggatggaaatataatgcaaattggtttttaaaaaaggaaatgtattgtcttccttaattgagatgtcaagggatgagactagccttagtcctcactgaggtcaaggctcccgggatgttctcgggaacttgcttctgcacatcctcactttgtccttctctgggcggctccagtatccggcttcatgtaagatggtggcttcatcgccacattcccttggggaatagaatgagtttctttctccagattcccagataaagtatttatcattggatctaagtggggtacacacttatcctgaacaatctctggccaggaaactgatacagtgattggctgaggcctagcatacacccctcctctaagacccacatgagcgtagaggaggtagagtgtgagtaatatctttgtggaatatatgttgaactgctggaagagagacttcaaataagattggcttaagcaagatagaagtttctttctccctcacctgcctgcaggtaagcagcctgggagcccaggtttttttttccccatcttgttgcttctctatccctaggtattgtgatgtgagatgtttcaccatcacctccactgcctagccagtggaaacggaaaaggcggaagaggagggctcgcccctctggttaaaagtgtcacctctccctacttcaatgctgctggtcagttacttggccaaatatagcttctaggaagtgaggaaatacagtattttttttctggatttccgtatctccagataaaaaacaagaattctttaaacataggagatgagtgtgatcgggggcaattagcaatctcagccccagcctgtcccattggccagtcaaatttccatgtgtcccctccccaggggagacaaccctaaagttgcatccagtgcctatgtccagctccaagcctgggacctgtggagggacagcctgcaccatcagatctgatgtggtttttgttttatttttgtttttttagacaagttctcactatgttgcccaggctggtctcgaactcccgggctcaagcaatcctcccatcttggcctcccgaagtgctgggtttacaggtgtgagccaccacaccaggcttctggatgcagttctttatggtgtgttgccccggaacccttacatacattgcctgcctccttacacccaatatgcaacagccagtaaaaataagataaacatggtgggaaacctcatccagaagagggaaaaacacacccaccaaatcctggtgggcagaaattgtgaaggctcccagggagtggagcagagtccttggatgacagcgcctctctccaggagtattccctgggatagacatctttggaccttggtggtcccctctttgtccactgccttccatggcacaactaaagggcatcaaacggtgtatccctcttagggctatacagcttaaacatttttttttagagagaaggtcttgctgtgttgcccaggctggactcgagtgcctggggctcaggcaatcctcccacttcagccttcagagcagcagggactacaggcacatgccaccacactgggcctgggctgcatagcttttgcagcccactttttgcaggtgcaggtttggtgggtaggggtcggttgatttaaggagtcaaaaatgcagacttgtaccagccagactcatggttctttggtaacacatgccccttaaaatctcagttggctttctgcctatttgtggctagttatcctctggggcaagtacaggttgggtatcccttatctgaaatgctcggggccagagtgtttcatatttcagattttggaatatttgcattatcctggctgaacatccctaatctgaaaatccaaaatctgaaatgctccaatgagcatcatgtgtgctcaagaagttttggattttagagcattttggatttctgggtttttggtttagtgatgctcaacctcctttagattagcagtatttaagcctaaaaatggtggccttttatttatcagcctgtatgttatatctattcacctccctctcaacctgagaccagcgaaaacactcaacttggactggaaggcagcttccttgatctggtctttgtggccgagcggctgtcattgtcaggttgagaaacgtaatcaagtgtttgagaaagactagggtccatagtctcgtctcctgctaatcctgcttcttcagaaaattattctatatctgcctcagtttgtggtacagaagcaatagatttttctctttatttttttaaataaatataattttattctaaaggaatattattatatggcaacactttgagaaccataaaggtgcctttgaaatgttgttagaaaatcacttaaatcatattttttattaataaattgatgccattttcaggcacagtatttttttgggcaagcactgtacagcataattcaaaatatacccatttacagaatccaattaggtatttttctgctcacaattatatgatggctgatttctgctcacaattatatgatggcggatttctgcctacattatgatgtgatatgatatgatatgatatgatatgatatgatatgatatgatggctgatttctgcctacattatgatatataactgctctacagaacatgaaacagaatttcataacatcagttatatttacactctactttaaaaatctttcaagatataagaatcaagctatcaaatatggagtttttaacaagcaatagtttttttttttaggtctgaaaactttttaaactgaggttatagcccataggcaaagggagcttctttcagcactgctgtattctcttcagtatctgccttcctcgggctagctctgtccacgttcttctgggtcatgtaggactctgttgagagtggcaagaagcatccagcaaacacctgcattctgaaatttccaactgtttcctttagagcaagagctgactttgcaaggtattgcaggaatcagttgatcgactgctatggcatggcataaacagggtttccagatcatcatatttatgtatagcatttaaaatatgttttcagttttgttaccagcaacacagcccttcttggtaataattagtatacagcctttactaataattagtatacagcactaataattagtatacaggctttccttctgcaagagagcactcaccccaaatagtgactgaaatagactggaggttaatttctctttcatggaaaacctagttagagctagtccagggctgataggcaaccacagtgtgttgggacacaggctccttctcttttgtcactctgacatccttagggttttagcttcatctgattgatataaactggcttcacaccatgacttcattcctaccaggggagagggaaaggggcgaggcacatttcttctgaagtgcatgaccgagaaattgcaaaaattacttctgctaacatctcactgctgagaacctaatctacagcatgttgggtgcacgatgcctgggaaatgtggtcattattctgggcagttatgtactcagttagaggaattctattactatagaaggggacaataagtattgggggacaattagcagtctctgtctcgggatgatcccccaaatgaaatgggggctggattgtggggagctgaaaaagcaacagatgtctactacaatgcctctcctctgagcactccagccccttctattcccttcaatccttgtgacctaattgtcctttgggcatctgtctcaggtcccctgaatcccccatcatgtaggctttggggccaaggcacctctgatttagcctatattgtcagcttgcagctgataattattattagggactcaggaaaatgtctgtggaactaaattgaggtagtaataggcatttctgaatcaactgccttccattcattcattcattcatccagccagccagccagccagcaaacatctattatatgctaagtcccagggagtcagtgtctttttgtcagacaaaaagacagccttttcatttatggctcttttggctagaggggtctcttgtaccctagagatattttgctagaaaagcagatgctgtttaactgaatcaaagctctctcttccttaggcattgatacatcccaacttagcatttcctcaaagcttgcacagaggctgtccccagcggtaatttgtgctttgggacagctcagtatcaggttcccttagtctggcaacagtgtcttgccctttcctttggggaaccactcttcactagtctctgtgacccactgtcagccctactgcagggccccaccattttgggaagagcagtgacacaggctggtcaattgaagagctctctctctggtccaggattgtcaagtaggggcagtaagacttgatttgtgggttgtttagatccagagatgtgaggatgtagatttaaggttgccagcaactttctttcccaagaggagagagactacggtacctcagtactacccccatcatttcttcttgctctgctattacataaagaagtcacctctttcctcctattgaactcctgaatctcagcccattgaggaccttattgccagtagcaattctggctcctgtatctcctgtccactccttctcaatgggtacttctccctagcagtcaaatgtgctcagttcgttacaatgtgcagtggatacttgtttctggtcactcaggcttcaacctccctgctggggaaaactgtcttgtgagcagtctcggtggggcagtgggtgatcctagagaggcattgggccaggtattcctccaggtatgtcgatccaagggcagagggcatgtggccatagctcggccaaacaaactgccactccactgggattttgaatcttgagctgagagacacaccaaggaccatggacaggaatcctttctgtggaggtggcactggggagcaagtggttcctcctgttgggatctggagtcacctggctcctgccttgaagaacatggctgaaagcattagcatctggagatccctgcgatcttttgacatatccccttttgcttaactttttttttttttttttttttttttttttgagacagactcccgctctgttgctaagctgtagtgcagtggcacaatttctgctcactgcaaccgccacctctcggctacaagctatcctcctgcctcagccttgggaacagggggactacagaaacatgccaccctgcccagctaatttttttttttttttttttgagatagagtcttgctctgttgtctagactggagtgcaatggcggtgcgatcttgactcactgcaacctccgcctcccaagttcaagtgtcctgattctcttgtcttagcctctcaagtagctgagattacaggcagacgccaccatacccggctcattttttgtatttttagtagagatggggtttcaccatgttggccaggctggtcttgaactcctggtctcaagtgatccacctgccttggcctcccaaagtgctgggattacaggtgtgagccactgcgcctggccatccctttttgcttaacttaaccagacttgctttctgttgtttgaaataaaagaaacctactacaggatgcagataataaaacaagcaagcaaacaaaaaaaaatagcattaaaaaaatgcctctcttgaccctacattccttcccaagtgacacctttcttctcccctttatggctgtgtttaaaagaggcatctgcacatgcaccatctctggttctctcctccagctcatcccccaacccacgccagtggcttctgcctctgccacctcactgaaggagcttgctccaagtgccctgtgtcaccatgatgtcccagtttcccactatcttttctgggtgctcctccatcctttgtcacctggtgactcacaaatgggtcctaagccctctcctcactctactctttccctgaagaccttatccacccctgtgacttcagcaaccaccccatgtccatgacacccagacttctgaaaaactccggtccttggctgggcatggtggttcacgcctgtagtcccagcatcttgggaggcagagggggcggatcacctgagatcaggagttcgagacctggccaacatggtgaaaccccacctctagcaaaaatacaaaaattagctgggcatggtgatgggcacctgtaatcccagctattcaagaggctgaggcggaagaatctcttgaacccgggaggcggaggttgcagtgagtcgagatcacgctattgcactctagcctgggtgacaagagtgaaattccatctcaaggaacaaaaacaaacagaaaaacccctccaatcctgtaatgtgcaacccacctgtccacgtggtgcctcaaacatcccagtgtgcccccgctggacccctgagtgcaccccacactcattcctcttctgtcagggttcagagtctcagcaaatggtagttggcccatgtggtcctcaggcctgagctgctctctaccaaagcaatctacacatatccatcccttccttcccccatgcagtgcagcttgtacctccaggacctgacccaggaggagctcagtaaatatttgatcaagtgactgatagcagcgataacactccacgggacacgttcacaaacaccctcttcccccagccctgttaggtaggtataattactaccactctgcagatgaggaaactgatgcccagagagatgaacagttttgcttgggtgtggggttgcacagccagtgaatatgtgggggagttgagattggaatttaagtgtgactccccatgctgggttctccctggacagctgccacagccaggggagcctccttgccagggcatgaatggaagaagggggccagttggacaaggagtgatgccctggggtgagggccagccagctgtgttcacaggtagattgcatggcagacatctcctgacacccagccccaagaaggcttccttgaaacacacagtgaggttcttggttcttgagatgtcctgggagctgagagccccaggtttggggcctggatctggcaccaactctcagtgtaaccacaagcagtccatcccttcttggggctcagctgacttcactaaagagggaatatgagtaagatgcctaagatgtggaagcagaggtcctaattcctggacaggggcagaagtgggtagtggcctcggcaaacaaatcccctatttgcctcctttaagcaggatccccctaccaggcagtgtgtgatggtgaggcccaagcctggggtctgacgtcgacacccctgtgggcatttggccaaaggcagccatctgccagaatctgagagctgctctcagacctcgctggagagggctacctggggcagtctgagtctctctgggcagactgaggtcctttgctacccaaacggggagaattagagatactgttggctcctgggcactggaagggaggaacgcaggcctctcagcacagggctgggccaacaagttgggggtcccggcacaggggacaacggagaagtgccaacattgggacccaattatgtgatactggggcccagagatagtacaggtgcctcataccacgtggccctgggtggacagcaggaatctattgcgagtggcgggaggccggggctgcctgtcctgcgccctgaagctggccagcggttgtggaaactgggggatattgagggaaccgtaggcccaggtcctcagcctcatagtgtggaacctggcgatcccagggcctgggctggcccccggcgtcacgggaccgggaaggcgctgtggtgctgcggggaattgcggagaagaaggcgggctccagtggaggtggctcatccccgcacggtcactgccctcgcccgctgttggggtccgcggctgggagactgaaggcctcaagtcgggctgggtaggggcacgtgggcagggaaaggggtggtagattaccagtcttcaggggcggggctggagatgcaaccctagggaaggagtctaccaggctgggctcttgaggggcaatggagggctccgggggccaggccaggccaggatcatggagttcaaaggactggagtgaggtttggggtccatgagagtggagctcagaggatgggacggtgggtccaggatttgggacctggggctggaaagtccgaggctagtggagaccaggcctggtatcccagacgaaagggccctataggaaacggggtctcgtgggcgggatctggagccagagaattgtgagaggcggagctaggatggagaaggcgagaggaaaggggtagccgccggcgcggagacctcaatgcggggcgtggtgcggagggggaactggagcgaggggcactggagcgagggggtggggctacgaggaggtggacttgaggggctgggtctggggccggagaatcgtggggagctgcgcctatacacccgggacggtggggttgcgtcggggaagtgggagtcttgggggttcgctgggcagcctggagaacaggcggtcgtggtgcgggcggggccgaaaagaccgaggacagtggggacccggcctgaggaggggtcgggaaggaggggtgggggcgcgcggacgcagatcccgggccgcggcggggcggtggcaggctccagagtggcacgggcccaggtgagcgaggtctccgcccgccgcccctcccgccgccccggtgccagctgccccgctggcccctccctgtacccggcgcttgctccgcgggccgggccgacggcggcgggcggcgtctcgcgcccaggccaggtcggctctggctccatcttgggccgcggcacctggcacctgtggcggccgcaggagcagcgcttcccccgcctgcgcggccccggcgggcgagagggtgagaggctggctccgcgcgctcccgttggggcggggggcgtggtgggcggcacctcccccttgctgagcctcagaacccactccttcccgctgcctgcgctcagacccccggcatcctggcccctgcccagcgcccagagcccccggtggccgcatcgcactccccgcgctccgcctctcattgtcctgtcctgtcccctcttctacgtctcctctgcccatcctcccattttcacaagtctgtccgggaccctgtctccttcggcctccacccctgctgccatcgctcctccctctccccttcttccttttcccctccctcagcctactgcgccgcctaccccgcccccagccttgctgccctttggcttctcctgtcccgcatcattaccccggcccacagccccatttgcctgcagtcgctgcctttgctcctgagaaggtctgtagcctcgtttcgggcccgtattgagcccccttctccctaagtccgggtgggctttgtgcaggaggggcgggaggggagctattctgggcgaggctgcgtggtgcggtgctttcaggcctttggccccgcagcaggggcggcctgtgcttggcgtgcagagtgcagctgggtagacgctgttactgcatacgggcctgtgtgtcccaggctggggcatgagtgcttgtgagcgtgcagatagggacacaccggccgcctaggctgcttctaggccggggcaccctctccacctaggtgccccccagggattgtgggcaaatcctccccaggggaggaagctcaggggctgttgggcgcctaggcctcttcctggtgagcagagcctcatccatggggccactgaccccacagttaccccagaaccctttcctggcacagcttgtgacccggggcatgtagcccttaaggcacgttcattgtgaagggcaggttttgtctcctccaaaccctccctttaggaatgctgcctgctgctttgcccagagttggccctgagtgttcctatcaggccccgttcactctggggtggattaaaccacctcctggagggtgctgtatccccactgtgcaatgggggtttgtgctgtgtgcattcctgcctggtccttgagaggtaaggtccatattttaacatagaaccagttttcctgcctgatcatataggtttgcttttcctgttttggttttgccggacacataagtcatcatccaaatgcttgccacttaactagaggggacttgggccaggcgctgtggctcatgcctgtaatcccagcactttgggaggccgaggcaggtggatcacctaaggtcaggagttcgagaccagcctggccaacatggcgaaaaccccatctctactaaaaatacaaaaattagctgggcgccgaggtgcacgcctgtaatcccagctgccgggagactaagacaagagaatcacgtgaacccaggaggcagaggttgcagtgagccgagactgagccattgtactcgagcctgggagacagagcgagactctgtctcacaaacaaacgaacgaacaaaaccaagaggggacttagatggatgccacagtgttgtctgagatggagcccacttgtggtggtcttggtagtcccctgggcatatcccaaaggcctgggctcctctgctgtggcagcatggcgggagctggactctgtacgttgactcaaaggtctctatgtttgggctagtctggaagtgtctgagaactgggggcttttactcaaaatgacattggttgattgctacataggtggttgatcttccagttgctgacaggtggaacctgaggcagcaggacagcctggcattggccacgggacatcggccacaaccatagcaacttcggcatcaaatggggcaggagagagaacattaaggtatcgttcaaagaatactagaggtcttggatacttctgtatgcctgttctttatcttgtcctaaaagatcttccgagggtccctttagggcaaaaccagaaccttctgtgttgttataaaggcagggtgggtgtgccattctgggcatttaaagtgcagactctagacttgtatgcatgcgtagcctcctaggttaacatttaaaataggctctgggaaacctagtttggtgatagggagactggggacactgatggtgacctggtcctaggatgggatgaaggtagcgaggatgggaagctagaggaggctaacctttggggtgtcttgatggcttctgaaaagggcctctctggcccccagtactaatacttgttataccatgaacttaagctgctcttgatgggaggggaaagagaagattattgttaacaaacactattgcagacagtgcacatgctgtcacatttggtcttcacaacaaccctgcagggtggggatttatttctgttttgcagattgaagaaactgaggctcaaagaagttaggggtccacctgtgagtacatgcacaggaaggggaagagcccccattggaagcagagccctgccccttcctcctcacccctggctccctgggaggcccctcctctggcccagtccacagcactgtgacaggcagtgtggaagcctctttcccccagtactcccctcagagcccttccttccttctgagctgggaaggccaggttgtagttagccaggccaatccattggggttctgaattagccactttcagctgtgtgttctttgacatttctgagctgctccaggcctcagttttgtcacctgccacttgtggagggggaatggggaagggaaccaatagatacatagcccacacgggggtctctgggtgatgactagccctgggtgctgggcagccctctggtgagacaggcacagtgggatgctcattgctcatggcttctcagtgggtcttggtgggggtctgaggacctcattccacctgtctcctcaggggccagaggctgctggcctggctgtttatggcccccctccctgggagggtggtggggtttggccagaggctgtgtggatgtccagatggggcctccctggggtcttggacctgcaactgagtggttgtctccctgccaggggctggcagtgaccacagctgtcccagtcaggaggaacacctcctgccctcctcattcttgcagcctcaggagctgctaagaagcatgttgggcaggtggagatccactcagtgacttgttccatggcatgtcatgagcacgattggcagggccaggccagatcagtaaaaagggtgagagctgcgaggcataggcctgctcagtgctcgaaggggagaggagctcagctgccccacaggtgtgtgcccttgggggtcactgagcctctctgagcttatggaattctcctgtctgtagaatggagataatgactgtctcaagaggttgcttgcacagttatatgagacaatgtatgcaaaggatgtggcacgtgtctggcccttggcgagtgatcaggccctggcagctgttattatcatcgctgttacgggctttattgccctcctttgtttgtatgtccatcttagagctcattgagggcagggtctgggtcagatttctctcttggctactcctcctcttcctgatcctcccagggacaagtctggcttcagccccgtgaagcagctgggatgggacatccttaccaggccggggctgtgttcagagctgcacagtcctgtacggtagccattagcctcatgtggccagttagattcaaataaaacttaaacattcagtgtctcagttgcagtagccccctgctgagtgcttggtacccacatgccattggtgcctacctattggacagcacagggtagaatctttccatcatcgcaggaagttgtgcagagctggagtctcagggactacagcaccagtatcatcctcactgtggctcagcagccaccagccatctcctgagtgctgggctgccaggacatttgtaattacacagaaaccgagtcccacagcccttcccgaatttcctctcgggtagccttgctcacctggtcggggaggttgttgcctggaagtctttatcagcctaggctgggagggcagggctgggattgcccaaatgcagctgctgcctcctgtccccaccctgtttctcccacctctcctgcctggcaaggagtcccagagtgatctccctaattcactgctgtggccagggccgaggtggcccagacactttgaccccactgctcccctcatatgctctggacacatggcctctttcctcctgcccactccgctctccacctgaacaccttcttgcttctctcactccaggcctgacttacgtggctggtcctccaggaagccttttctcatctctcaccctccgtgagctctcctgccttggtggtgccctccctcagaccccatttttggcactcagtgccctcctctgtgggtgtgttcttgtatttgcttgttctcttggtcaggcacacagcagataatcctctgagtgccgacgacacatcaggtcagtgctgggtgttggacagccagaggggagcaggccacaggccaggctttgccaacttcaggcctgtggggaggctgacagttggccaaactgttccatgcaggcccaatgctcagtcagggatgaaggctgcctggctggagggtcgggaaaggggccccaggaagagatgcagaagtggaaagggccagaactggctctaggctgcagctgccaggtccagggtggtctttatggctgggggaagtgacagcgatggtacggagggtgggggacaatgaggatgcaggtacactgggcaagaggggattaaatgtcaggcaggataggtctgattgatggtactgggtgggcatcttatctcactgctgcaccgtccccaggggtacagaaaggtctgaatgaatcccatgttccctagccctacagctgggcacgcagtaggggctcaggagatgctgtggaatcaatgaccagatgctgaatgagtccctcatggaaaaagctgatgcatggggcctctccttgcccctggagctagaggtaggagtcagggaaccccagagacatgccagctcagcaaggctaggccaaggaggatgggggtggttgtggaagcccagggtgattctcagtgtcctctggtcattgctccctcgtcctgtgaactttctctgagctcccactctgtaccaaggagaccctgtccacagtgagttggatactgccagtcccaggaggaagtagcccagtattggcctgtccagctgtgcccgttaagaggccatagtgcttccgtgctggttgaccaagagctgttatcccacagccccaccccctagggctgcagtttcacccccaaagccccagcagatttggctctctcccttcccctcccacacaaaccagccagtaaagagttgagagctgatagagtggcggcctccaggaccccaccctagggcagattctaactgcttgagactgatgatgagataatttgcagtgtcatccttgtgtctaatgtgagatgaccttgatttgaagtgtctggtgtcttgtcactcactgccttgcatatggttctgaccagtcaggcaggctgggactgaaggtggctccctggtgaacctagcactgtgggagttcatagtagaatcggcttaggtgctgccacccaactcaactccactccctccctttctctcttctgcaggcagccatgagctccagccgccccgagccgggtccctgggcacccctgagcccccgccttcagcccctgtcccagagctcttccagcctgctgggtgaaggccgggaacagaggccagagctccgcaagactgccagcagcaccgtgtggcaggcccagctgggcgaggccagcaccagaccccaggccccggaggaagaggggaacccgcctgagagcatgaagccagcacgggcctctggccccaaggcgcgacccagtgctggaggccactggtggagcagcactgtgggcaatgtgtccaccatgggcggcagtgacctgtgtcgcctgcgggcccctagtgctgctgctatgcagaggagccattcagacctggtccgtagcacccagatgcggggacacagtggtgctcggaaggccagtctcagctgctcagcccttggcagcagccctgtccacagggctcagctgcagccaggtggtacttctggccagggtggccaggcccctgcaggcctggaaagggacctggctcctgaggatgagacttctaactcagcctggatgctgggggcgagtcagttgtcagtgccaccactagacctgggggacacaactgcccacagcagcagtgcccaggctgagcccaaagctgctgaacagctggctaccaccacctgccatgctctgcccccagctgctctactctgtggcatgagggaggtgagggctggtggctgctgccatgccctacctgccacagggatcctggcctttcccaaactagtggcgtcagtgagcgagtctgggctgcaggctcagcatggggtgaagatccactgtaggttgtctggggggctccctgggcattcccattgctgtgcccacctttggggtcccgctgggttagtcccagagcctggctctaggaccaaagatgtgtggaccatgacctcagccaatgacttggcccctgcagaggcatccccgctgtcagcccaggatgctggtgtgcaggcggccccagtggcggcctgcaaggctgtggccaccagtccgtccctggaagcgcctgcagccctgcatgtgttcccagaggtaactctggggtccagcctggaggaggtgccgtcccctgtgcgggatgtgcgatgggatgctgagggcatgacatgggaggtgtacggagctgcggtggacctggaggtgctcggtgtggccatccagaagcacctggagatgcagtttgagcagctgcagcgggcgcccgccagcgaggacagcctgtctgtggagggccggagggggccactgcgggctgtcatgcagtccctgcggcgccccagctgctgcggctgctccggcgcggcccccgagtgaggagctgtggcccttggagctggcctgggcccactgacttagtcctagacctgggccagggacggtgggggctccgtgccccctggacccaccggcagctgggcacatctctcacctgaatattggctgcctccagaccacaggactgcagcctggggcttccggccctacacagctgggctgttttcttaagggcttgatttccaagggccacatctctgcaccttccgggctctgaactttgagacagggctttagcactgtgcagaggggagatcctgagttttctgtaaaaaatgaccttttgttcactccaccctcagaactctgccatgttgcctcgtcagactcttggtggctttatttgaaatcagtgctgagaaatagtgaattctcgacatgaaatgtgaggccccagtgacagggactgcccaggtctttagggaaggggactgatgttatcagaggcctcctgtgtgccacatactgtgcttgtcctgtcttcacctcttcatcctggcaagccttcatttggcaaggctgtagccgatgtgccccacgctggacagcttgaagaggtgggactgagatccaaagccagggccagctgagccgtgggtgttgccctgtagcatgtgcccggtccagtcagtgcagtcatgtatgaggagaatttactgagctcatactctgtgctgggttctgtggattctgtggtgaatgagacagaggctgcccctgccctggctgagctcatggtgtgggttggggatggcaggggaggatgctgaccattacggagggctgccaggcttccagggtcattgtgtcagaggctggcctgaggaaggggagaatgggtggccacctgccctaatctcagttacaaagcctaaaattgcactattttcacctcattctgtcggctgaaggatttctccccagctggtgcagtttgtggaaggagggagggcaggaatggagggggacagggcaggagtttgccctggccctggggtaggggctgtgaggctgtgggggctcgcttgcccacatgacctgacctaggctaggcagtgggggccaggggccttggagagacagaaacatgggctttggcacagtctgacttcattgcccaaagatttctcgaggcctgtgaagaatgggagtgggcttgtgttcttgtcctgggtctttgtcttgaagatcctaagatcccgtgacacagccccccaatccacccgtgtgagggaccagagggctagtgtggggtcatggcccacgacctggcctgtttctggagcctcttctgcacctaggagcccaggacccccacagtggtggcttacttttccccatcctcaaggacctggtactcattgaggtggaaatgactcatgcaacagttggtgaatttgtaaagcaggagtggcatttcaacaggccacaaggacaaagtgacaaaggcgtgcgtcaggtcagatgcctcctgaagcccaacgatggaccattctcacccgtaaacatgcctttcccatatgcataggtgcaccccttgggattctggggctgtcagtccctttgtgtatggtgccagggcaggcagctcacgttctggggagtgacacatgggtatatgccatcttcatgcctggctccccatggagtctccaggaaccccagcctgttagggccacatgagagagaacaaatggctgtgggtgcatggggagggacctttcacacagggccatagctaagtagggtcttgaggatgcaggggttagacaggtgggtggagagagggcaggacctgcctggcagatggaacagcctggtcagatacttggatgtgcctgtcctgcctgggccataatgagtttctgcagtggcggctcatttggagcgtttgttgggttgggaggtgaccaggggtccccattgtgaagatcctgatgtaaatgaggaaaggaactttaagggaactgtggaaggggttctgaggtgggaccagatttcagtttagaaatatccatttggcttccagtggagatgtgccaggtgacaccaaggaggggcctgtttaggggcaatggagtgggcagctgggggctgggttcatacacgtgcacacacacgcatacacaggcacacatgtgtgcaatggatttggggaggaggcatttcaggatgctgaggtttccagtttgagcaagaggagggtgaggccactacctgggtcaaggtgaatggcatgttcagcaggtgcagaaagggccacctgccacagggtttggctgggaccagtgaaacctacttcatgaagagactttcttctgtgtcacgtgcagattcttatgcattcacgctggctgggtgccactctgtgctacctccatgctgccctggcttgccaggatggcaggccgggctgggctcagccaagctcccactcacctcatcgtcactgagatgagtatttgcagagcggtgctgaaatccaacacctgtgtcttggctggggccccagatgattctcctggctaaaccacgatccttgtctccctagcccagttgcacagctgctgctgacaggtctacctgaagtgactgcagcctcatttctgattggaactggagacccctcccaaccccctttgctgtgccctctcctggaacagccctgatgcctgcagtggtttagggccccagagcatggccagcggtttagtttacagatctcctccccttggactctagatttctggccagactttctgggtccctttcaggccctgctctgggaggtgttggagttcactgttgatgtgtttgtttggctttgaattcaaaacagatacaaatttggaggtgagagctttgccagaccccagcagggatggggcatcggtcctgactggtcttgtttattttgtcctggtaaattctgttctttggagcataaaccctggagtcctagagccccttgcctcagcaggaatcccccctctgtctgctccaggggctccctgcttctgcccacctgctctccttccatggcattcaggacccccgacagctgaagcctctcttcatatagcttgtcccctctgggcctgcctgtcttgtgtccaggacacaagacacgcatcccttgtctggccccaggctgccatcactgtcacaagaaactcatagagtagagctggtctgaggtcacagtgctggtggtggtggaaaagcagggatggcctgttccactgtgatcttacctcctgtgtcacctggattgggtctctgtccccttagacatgctagatcctaactttacaagggctgaaggggtcttctacacgcaggtcccaacactttgggctggggttggccaccgtagcttagtgggctaaagctggagtttgaatctggatatataggatccacacctatagccatgtgatcttgggcaagttacaagccttgatcatcttcctcatctgtaagatggggatgacaatggtgcctccttcacatgcttggtgtggagattaaatagaataacccaagtagtgcctggcactgagttagtgctcagcacacaggctggtagtgttgggcacccctctcatagccacattcaggggccacctcttaccctgccagcttggctgtgatcacagcccacatcccacttccttaaaagtcccttgttcagagcctctttccaggttcctcgccccacagctttgcaccctgcctgggacttggccctctggctggggcttctgaaaatgtagttcccagagtgcattgaggagggctaccctagccctcaccactcatcttgggctgggttccccagaagcttctgctgagatgaggatgctggagttattagggaggggagagcaagttaagggaggggcagaaggcaaggcagggtgtgatttcagtccaagtcagaccctaaaggggagccctggatgcagtcccacctcagagtaaggactacccaggggtgaagatgtagcctccaggcacttctgctctctggcaggcaggctaggaagctctaggagccccagggtaggtttctgctggagtcgtagggcctattttgggggaagttgtgcacagaaaccaccagagggagtcacaggcatctgggggtgcacccattgacatttgcatccatgtcatgccaagcttgtagcccacaaatgcccaacccttttctccatgcattgctctgtctcagttttgttcacgccaagcagccttggttagttaaatgcagagcttggcatttgcccatgttaaattccttctcctttttcattctggcctggcctggttttgccatctgaagctatgacaagtcctttatcagttttcatccaacttgtcaggcagggcagggctggtatgaagcccaggacatatcactgggacatcccataggtctgtgagattcccaggtccctccaaatccacacggtcatcatgggcaaattagtttaagtctgatctgttaagatccagatctctcacaccaacagcacacacccctttttcccatggccatggaaggagggtagcatagcctgactcgagtcctcgttctcagcagaactggttctgtggtggccacttccctttctcaacttttacctacttctgtttaataggttgttctgcaagtctgagagcaacagcaagcttagaagtgtggactcagcctggtacagtggctcatgcctgtaatcccagcactttgggaggctgaggtgggctgactgcttgagctcaggagttcgaaaccagcttgggcagcatggagaaatcccatctctacaaaaaatacaaaaattagctgggcatggtggtgtgcatctgtagcctcagctactcagggggttgaggtgggaagatggcttgagcccaggaggtggaggttgcagtgagccgagatagtgccactgtgctccagcctggatgacggagccagaccctgtttcaaaaaaagaaaaagacaagaaagaagtatggactctaccttcttgcccttgtggagattgggaactgcctgcccttggcctctttcctgtccatcttgtattatgaaaggctgtttctggcacacccgggctcctctgtgtggtttctgggaagtgactgagggtcaggggaatggagcccctctgcagccggccgctggtaccttccctattgaacccttctttaggtttgctcactctttttgatgggtgtctttccaaagctggctggggacctccctgattgagagacatggggccagttctgttgctgtggctacacgggaataataaagcagaagaacacctgaggaaagctgatgtttactaaaaaaaaaaacaagcgaaaccaaagtgacgtgggcccataggattggggatgggtggtggggtctgactgccttgtcccaagagttgggtgaatgccgcctttgctcacttgtgcggtcactctccaggactcctgcctggcttctcccactccaagcccgagatagcccagcaaggaggaaggtctggccccaaaatacgagctccccaagtggatatcctaaaattcatctttcatggccctactttattgggagggaatgtgaaaattgtgggaatatgtccattgacatctggggctcagggcaggggagtgtgtctagttttaaggtgtgcgcttttagccatgcagtcatcgcccagtctgtcctgcctggagcttttcatttccctgcagctttcctgagaaaagacagagtgtgctttctctgcatcctatgaacatggccccaggactgcagcacctctgtgtgcacacagccaaggacagtcgggggacctctgctggtcctgcacccgctgccctgggtgctctgtcatccccatcccccatttctctttaatctgttcttcttttgtggtttcatgttctctttgttctgggttattcagaacctgtctgcctccccactgtccattgtacttgttcctgcctcctcctgctttgtgccaaggatttacttgccttcgccttctggctccatacagtagtctctcttcttgcggtcttggccattccccccaccaggcccccagctgtggctgtgtctgggtcttggcatttgtgatttacatgggtctaggccctttctctccacctgtccttcccctctttggacacaaaccaaaacatctgagcatctccttacagagggaggtctccctggggttgctgtgccaagtttccattgcttttgcccagaatgagaaatcagttgtcagtggccctgctgggtgaatggaaggactttggtcgggctggaagggcaccccatcagtcctaacttttggtggcccttgttggtggctggctggctaggctgctagagaggtacatcaggtgggtggcacccatctgctggctttaggcaggccatctcctcatccatgttttcagaatcttcttgcatggcttgtaattgggttggggtgtggcctgagcccctgtggggacacactgcactgtcccacctgtatgcttctctgctgtcaggaactggattcgtgtccaagagccaaggctagggactggaggaggagatttctgtctttgacccctccatattagtccattttcatgctgctataaagaactgcctgagactgggtaatttataaaggaaagaggtttaattgactcacagttccacgtggcccggggagcctcaggaaacttacaggaagcctcaggaaacttacaatcatggcagacagcgaaggagaagcaaggcaccttcttcacaaggcagcaggaaggagaatgaatgcagaaggaactaccaaacacttataaaaccatcagatctcgtgagaacttactatcacaagaacagcatgggggaaccgcccccacgattccatcacctccacctgatctctcccttgtcacatggggattatagggattacaattcaagatgagattttgggtggggacacagccaaagcatatcaccctcccaggcctgagcaaggcccaagcagggagcctctgttggggctggaaccctgggaggggtagaattctcccctccactcagatttgttccctgttgctgcccacctggcccctgccctgcagccttctgcctggccttctctctgttcacttctcatttttagcagtcaacagactgggagatggtggccaagggtgtcattttgtacacaagctttgtggcttttgtaagcccagcctgcaactcttgaggaaaactctttggtttgattttttttctcttcagagttgggggtattcagggagaggggcaagggcttcttgtgaagatttcaattcttgaaggtgtggaagcctcctgggctgggggaaggggtggggcaggaaccagcaggggtgtggacacaggggtctggcacctgggataccgtaggacagctgggcaggaagtcggatgctgctttattgaaatttttgatattttatcattttttcattagtttttattttaaaacactgctttaaaataattaaaatatgatttatcttggttaccgaatcacttagtgttgccttaaattttgcgcctagtccctgcctgacctttcctcctcctctcccagggctttaggtactcttagtccctgtgtcatagggactgggagcagataggcccctccgcccaccccacccctcccccacccctcgcccacccctcccccacccctccgcgttcctactctaatctcctaccctgatctgcggtgcagggcggcgctggagagggtggcttgcggctgatcccgcggtctggtttgcggctaggtgtgtgtccccggactggcgtgggtcccgggccaggcgtggtcctgggcggcgcggcccgtgacaggacccgacgcctcctggtgggcatttcgctccaagccgggaccctcggagcctgaggggattcgggagggaggagtcgccgtggggcggggcggggcggggcgggggagggctcccaaggccccgaggacagtcccaccctcaccgacaggaccgtccctgcgcatcccccacccttcttcatcttcgggcgctcgggccaacctggacagcagggcggaagcttccagaaaggacagagatggagaaggtgggaagggtggggctcaggcaggggacaccacggccttaggaatggaagacaggccccacttacctcttcgactccagatgcagctcatcctcacgaggggctggatgaagagggcttcctctctttcccccctaagctgtgcctctgagcctctgtgcaaatatggtggtgcaaacctttggtctgccttcatcattttgttgttgttgttgttgttgagacggagtcttgcaggctggagtgcaagtggcacaatctcgctcactgcaatctcagcctctgggttcaagcgattctcctgcctcagcctcagcctcccgagtagctaggactacaggtgcgcaccaccaggcctggctaatttttgtatttttagtagagatggagtttaaccatgttggccaggcagctcttgaactcctggcctcaagtgatccaccctaataaacttgctttcactttactctgttggctggctcttgaattccttcctgggtgaagccaagaaccgacgtagcctcccaggctgaacctcagtttggggctttaccccatgacacccgcaaagggctgggcttcccttcttcttggggagagggtcaaggaagtggctgtatcttgaacacccattcctctttccttccatgcgcacaaggcctctctgagctgctgtcttccttaggacactttcagctacaagtaagttaattttgaactgaaagttagctaaacaattattatagaatgttcaccttcccactgaagaatttaggaggtaactggcttctgggtgggctgtgtggctcagtgtggacatggattcaggttctttccatatttgtgctgtgccatctttagagcgtagtgaaggctgtccttagccccacgatggctgctgcatttcaactctggaattcagttgctggaattcacactccagtctgtgtgactccagggcggtcattttgtttgtcttttcaaaaatgaaagtaatacgtacttatgataagaatttaaaacagtacagacctcggccttttgttttattcatgataggaatttcaaatactgtgtaaactgaaggtctgatcctcgcccttgtctggaattcccgcagattaccactgaagatgttaataatttccatgggccttccacaaacttccttggtaatcacaagctcagacctctgaatattccatacaagtgagatcccacttagatactattctgtattaattctttaagataggccaggcatggtggctcatgcgtgtaattccagcactttgggaggctgaggtgggaggatcacctgaggtcaagagttccagactagccaggccaacatggtgaaatcctgtcgctactaaagatacaaaaattagctgggcgtggtggcgggtgcctgtaatcccagctacagtcaggagaatcgcttgaacccaggaggtggtggttgcaatgagctgagattgtgccgctgcactccagcctgggcaacagagcgagactctgccaaaaaaagaaaaaaaaaattaagatatgtcttgtagataatactgccacatataacaatattttctttattttcttcctgggcatattgtatggcatagtatacaagtgccttttaaaattaaaccagacttctttttctggactttatgttacacctcacattttttttaacttaatagatttatttcttagatgagatttaattaagagaaaaagtatgcagaaaatacagagttcccctacactttctcactctcatacactttctcctattatgagcttgcatagtgtacaacatggtacatttgttacaattaatgcaccaatattgatgcattactgtttcctaaagttcatggtttaaagtttactctttgtgttggacacttctctggattttgaaaatccatgtggtgtatctcccactccagtagcatacagaatagttggaccacctaaaaatcccctgtgctccgtccattcacccctcttaccttccccaggactcctggcaaccactgatctttttactgtctctatagttttcctgaatgtcacagagttggcttcatgtagcatgtagccttttcagacaggcttctttcacctagcaatatggatttaagcttcctccatgtattttcatagcttgagaactcatttctttttagtgctgaaaaatgttctgttgtctgggcatactgccatttattcatctaccaaagggcatcttggttgctttcaggttttgactattatgaataaaactactataaatattcatgtgcaggttttgatgtggacatatgtttacttcagttggttaaatacgcagggcaacattgctgtaagactatgtttagcttcataagaaactgccaaactatctctgtacaatttcgtattcctactagcaatgaatgagagttcctttttctcatataaaaataaatatccttgtatgtatagttttatgttcaggtgtgagtatatctgtaggataaatttttcatcaagtggtacatgtaaaatatctaccggtattggcaaattgctccccagaaagattgcaccaataatacatgaaaacgcatattttctcatacccacgccaatatttgattgttaatcgaactttaatattttggctaatttgataagtgaaggaacaatgtcttcctagttattgtgatttgcaatctgttccctgtgagtgaggttgtggtctgccggactgcgtgagtgagaattcctgttctggcactctcaagctgtgtgatgctgggaaagttgctgaacctccctggacctcagtttcttcatctatagaatgaggatggtaatgggtctttaccttattaattggattggaggatttaatggcatcattcatgtaaagtgccagcacagttcctggctcaaaataagggccaagtaaatgtaagctattattattctccaatatgttcataagcacttgaatttcttcatttctgatctgcctatgttcatatcaatttcccaggattttttcttattgattggttagagctctttgtatattaataacatacgtttatttttttcatataagttacaagtatttttttattccagtgtttcatttgtctcctgtttatcagatcctggctccaaaccagtgcaacatccttctcagggacacagcattttaaatcttacaaagcccctcatttcccatctgtcatttatgtctcaggacatccacatgaggcaagctgatgtatttttcagtaaagaaggagactttattgaccaggcagggcgagtgacttgcctaagggcacagaaggaattagtggtttgtacagactgaaatggagggtcctggcccctaggtaccacctcctccactcttaaagaaggggagagggaatctggaggtgcaggaaggaaaaggtcaaggtcatcatgacagacagcctcaccccatcccctctcagaacccaagagcctgggtccttttttttctgttaagttctgaccattctctcctgataaatcaagggaagaatgcgagtaaagggtatgtgttactcgggcgagactccctgcttggaaggtctaggaggggaggtatgtgtgtgagtgtgtgtgtgtgtgtgtgtgtgtgtgtgtgcattctttctgtcaagttgcccagcaggtgagctgaaagctggctctcttaacttggggatgagcaatagagtcaggtctcggttcgtcattttccaatttcatcagctttgaaaatattttaataataaaatccaagcatttgattttcctgactagttgtttattctgatttattggctatgcatggtgcctgaagctcctccaaactcccaagggtatccctgcatgtctcaggatgtctcttaacccagtgccatgtgagggacagaacctagaccaggcattcagagccaggtaccattgtgcctaccctactcactgctagatgatgctagtgaggtgctcacacctctctgggcttagtccctccattgtaaggcaaatgggaggcctgctgcctctgccttgctgggttgttggtatggctgaaatgaggggatgaaggtgatgtggaaaacttgataggagagtggctgccgtgtgtccattctggtctcctttgtctcatgtcaagcccagggactggttctttttctctcttcgggtctgtgacttctgggaatcctgcttgcctcggtgccccctggtgaggtggtgccatataggttgctttagcacatcaccgagagggactctccaaaccctatgctaagtgttcaccgccagaacacttgcatttgggccagaccgggctagggtacctaaccatagcttcctgggttcatttcacagggtggacagcaactgagagatgtccagggaaatttccctttttaagagataggggttctggggcccataagggcaggaagtatccccaaccacaggcaagttcatgaagcccatagggagtaggatggagccagttgccaggagcagggaaaggttcatgtctttgctcctccatgtacccagggactcagcaccacctgcaagttgatggaaaggcagaatctcagcacactctgagcccccgaatcagagtctgcattttaacagaacccctaggtgaggcagaagcccactactccagtatcattcattcattcactcacctagcaaacatgcctgaggccgactctgtgccgtgccctgtgctgacgaagaccggccaaaagaccttgttctggtcttcctgaagctcaggtggagcagacaccccaacggccaacaaatgtgaagattgagaactgtgatgggagcctgaggtgggagcagctaagcttccctggggaattgggggtcagggaagtagtcccaagaggctgagtacctcctgtgtggcaggggcagggtggcctttgctccctagtatcttttttttttttgagatggagtctcactctgttgcccaggctggagtgtagtggcgctaccttggctcactgcaacctccgcctcccaggttcaagtgattattctgcctcagcctcccaagtagctgagattacaggtgcccgccaccatgcgtggctaatttttgtatttttgctagagacggagtttcgccacattggccaggctggtcttgaactcctaacctcaggtgatccacccaccttgtcctcccaaagtgttgggattacaggcttgagtgactgcgcccggcctgtgctccagtatcaaaacctgcaagcacctacagagtggagggtgctatggtcagggtggtgctcaggtccagactgatggaggaacctgagcaggggcggggaggcatttcaggaagagggagcagttgctcctgcacaattttgttgcatcgggccaagcaggaaggctggagaggtgaggaagagccccgggggaaagcatggaccatcagggaaaagtcagacattgccctgttgctaaaggcactcctggatgggttttagcccggggagacctgaatcaaattagggtgcatagaaagaccatgatatccccttgatggggaggagaaagaggagaaacaggaggactaggagggaaagccgaggcgatttgactcagcatgagtgagatgtggggcagggagagagagagagagaaagacacaaagagagagacaaggagagacaaaggggagagagagaggagagagagagagagaacagagagacagaggagagaaagagacagaggagagagagaggggaacagaagaaagagaggcagagagacagtgaagagagagaaagagagagagattgagaaagaaactttgcatccgcaggcctgggccccatgcagcactgacagtggtaggcagccgacgtgaagcaggaggcacaggcagggaggatggacacagcacctcccacagcttctgagtccttggtgcagaatgtttatggcacttttcttcgttctttcttaagacttatttagtactcatcttttctcctttactccattgtgagcttcccaatgataggggcactgtctctctcatgtctgtcttcccacattgcttatatctaggatgggaaatgcaaggctcccaggcaatgcttagttaaaggggcaaagggctgtggtcttgtcttaagtctctgccaggctgaatgcctagaacttggccctcaggagggcctgagtcactgtgggacacagacttttaaaaggtgaaacagccaccagccaggggtgaggaactaacagcagacacattgcctgattttaagatgtactataaagctacagtaatcaactaagtgtggtattggtaaagaatagacatagatcaatggaacagaatagaaaattcggaagcagatccacacatgcacagccaattgattttcaacaaagatgcaaaagcaattcaatgaagataatcttgctaacaaatggtgctagaaaaatagaatacccatatgcaaacaacttatttatttatttatttatttatttatttattttgaggcatgtcttgttctgttgcccagactggagtgcagtggcgcaatctctgctcactgcaacctccgcctcccaggttcaagcaattctcctgcctcagcctcccaagtagctgggattataggcgtgcaccaccacgcctggctaatttttgtacttttagtagagacaggattacaccatgttggccaggctggtctcaaactcttgacctcaagtgatccgcccaccttggcctcccaaagcgctgagattacaggcatgagctaccacgcccagcctatttatttgttttctttgtataaatttagggggtccaagtgcacttttggtacatggatgtattgcatagtgtgaagtcttggcttttagggtggccatgacccgaacagagtgcactgaaccctgtaagtaacttctcatccctcgccctgctcccaccctgctgcccttctgagtctccactgtctattatgccatgccgtatgtccatgtacacacattatttagctctcacttgtaagtgaggacaagcagtatttgactttctgcttctgagttattgccttaaggtaatggcctccagttccatccatgttggtgcaaaagccattatttcattctttcttatggctgaatagtattccacggtgtatgtgtacacacacacacacacatctataaaatatattttctttacttaatcatctgtcatatacaaaaaagatttatcttgattcatacttcgcagcatatataaaaatgaacccaaaatggatcacaggcctaaatgtaaaattgaaaactaacagatacaaacaaagaagaaaatgtgtgaccagggttgggcaaatatctcttagatgtgacacaaaagcatggcctacaagagaaaagtgaataaactggctatctttttttttttaattattattatactttaagttctagggtacatgagcacaatgtgcaggttagttacatatgtatacatgtgccatgttgatgtgctgcacccattaactcgtcatttacattagatatatctcctaatgctatccctcccctacctcatcccacaacaggccctggtgtgtgacgtcccccttcctgtgtccaagtgttctcattgttcagttcccacctacgagtgagaacatgcgatgtttggttttttgtccttgcgattgtttgctgagaatgatggtttccagcttcatccatgtccctacaaaggacatgaactcatcattttttatggctgcatagcattccatggtgtatatgtgccacattttcttaatccagtctatcattgttggacatttgggttggttccaagtctttgctattgtgagtagtgccgcagtaaacatacgtgtgcatgtgtctttatagcagcatgatttctaattctttgggtatatagccagtaatgggatggctgggtcaaatggtaattctagttctagatccctgaggaatcgccacactgtcttccacaatggttgaaccagtttacagtcccaccaacagtgtaaaagtgttcctatttctccacaacctctccagcacctgttgtttcctgactttttaatgatcgccattctaactggtgtggtggttttgatttgcatttctctgatggccagtgatgatgagcattttttcatgtgtctgttggctgcataaatgtctttttttgagaagtgtctgttcatatcctttgcccactttttgatggggttgtttttttcttgtaaatttgtttgagttctttatagattctggatattagccctttgtcagatgagtagattgcaaaaattttctcccattctgtaggtttaaactggctgtctttaaaattagaaacttctaagctgggcacagtggcttacgcctgtaattccagcacttggggaggccaaggcaggaggattgcttgagcccaggagtttgagaccagcctaggcaacatagagagaccctatccttataaaaataaaaaataaaaaaattaaccttgtgtggtggcatgtgcttgcagtcctagcaacgtaggtggctgaggcaggaggctgaggtgggaggatcacttgagtccaagaggtcaaggctgcagtgagccatgattgtgccactgtactccagcctgggcaactgaccaagaccctgtctgaaaaacaaaatccaaaacttctactatttgaaagacacagttaaggaaatgaaaagacaaaccatagagtggaagaaaatattttcaaaacacatatctgataaataacttgtattaaggatatatgaagatctctcaaaacttaacaataagaaaacaagcaacccaatttaaaaatgggaaaatatttgaacagatgcttcatcaaaggaggtatatgactggccaatagttatgtgaaaaaatgcccaacatgcttagttatcagggaaatgcaaattaaaaccataagatcagaccaatgcatacaaaatggagtggcttaaaaaaaccctaacagtaccaactgccttgagggttctcagtaccaactaagaactcttgtacactgctggtaggaatacaagatgggatcaccactttgtcaaactctgtggaagcttcttataaagtcaaacaaatatttaccacatgacttaccaaacatactgctaggtacttacccaagagaagtgaaaaattatgtttgcacacaagcctatccaccaatgtttacagtagctttatttattatcaccgaaacctgtaaacaaccccaaagcccttgaacaaactctggtatatttatgtaatagaatgcttatcaataaaaaacaatgaactaattatatatatatatatatatatatatatatatatatatatatatatgatggataaatctcaaatgcattctgctacgtgaaagaagccagactcaacagctgcgtatctgaattattccatctgtgtgaattctggaaaagggaaaactattgggataggaaataaaggagagcttgccaagggctggagagtaagggaaaggctgactacaaagaggctcagatggatttggggagtgaaagtgtcctatatttttactgtgatggtaacatggttgcgtttgtcaaaactcatagaattgtacactaaaaagagtaaattttatcatacacttatatcttaatatacttttcagaaagcaaagtatgtaattatacagatcaacaggaagaacaaataaaaccatacaatactcacacctgcaacataactagaagacacagaacactataatcttccaattacccaagagaataaaaataagcaaccattaccagtggagctctttctgaagtttctgccccaaaccttgtcaccgagtaaggcagagcctggataaaactgcatgggaggtgcatggatcacctgaggtcaggagttggagactagcctcgacaacatggagaaaccccgtctctgctaaaaatacaaaaaatagtcaggcgtcgtagcgcccgcctataatcccagctactagggtggctgaggcaggaggattgcttgaaccccaggggctgaggtttcagtgagctgagatggcgtcactgcactccagtctgggcgacagagcgagactctgtttcaaaaaacaaaacaaaacaaaacaaaaaaacaacaacaaagagaaaaactgcataggagagagaacaggggaatagagtgctcaagactgagctaaaaccatccccagaaagactggaaacagcctagttgtccttcaatagctggatagttaaaggttagaccagcatggtacatccatgccccaaaatgctgctcagtagtcaaaaggaaggaactgttgtctcagaatgcggatggatctccaggtcattctgctgagtgaaaacagacaatctcagaaagctatctttgtgtgattccattgatgtaacactcttgaaacaaaattttagaaatggagagcacattagtggttgccaggggttaagcagatgtggctgtaaaagcgctgcgggagggatcccgcggtgacggagcactctgtatcctgactgtatccatgtcaacaccctggttgtgatgtggtcatacagtgttgcaagatgttacactggggaaaactgggtacagggtacagtgggcctctctgtatcattgcttacaactgcttgtgaatcatgactctacagttaaaaagctcggtgaaaaaaaaaaccctcatttacaatcgcatcaaaaaatgtgaaatacttggagataaatctgacaaatatgtgtaggacttgtagactgaaaactacaaaacattggtgagaatgaaaggcttaaatcacagtacgctaacaatagatggatttgatgaatgtaagtgaagggaaatagtgttgatcacagacctgaaatttttctttttcctttttttgagacagtcttgttctgtcacccagtgtgtagtgcaatggtgtgatcacagctcactgcaacctctgctccccgggttcaacaaattttcctgcctcagcctcctgagtagctgggattacaggcgcccaccaccacgcccagataatttttgtatttttagtagagacgggagtatcaccatgttggccaggctggtctggagctcctgacttcaaatgattcgcccacctcggtctcccaaagtgctgggattataggcatgagccaccatgtccggcctgaaatttttcaaaataaaatgctggtaagagggaaaaaacaaaaaaagcataggaagaagattttaggaatgcatagttagttctgctataacacaatatatgtgttcctaaaaaaccagtgctctatgcaaaaatcacataataaaaaccactgggcttatgggaaaagtggggttaaccgcacaacactccaaaattttgtcagtagcccataagaaacaaaaagataggaacttaataaaaatagtcattgagttttgcacgtttgatggttaagaaaagcatgtatattgcaataaatatgacacttgatcttgaaaaagccctggagtttgtgtgtggacgtgtgtgttaccagacatggagctgtaacaccagatgtggatggatgcagctcataacacacgaggtggatgcggagctgtgggcatttgaggcatccatctgggtgtattttggctcggttcagttgggtacaactttctgtgctcacctagagtttcttgtagaccacattgcacataagcaagtgtgaaattcacatcatgctcaaattgttccctaatactgtaactcaatctcatgggaacaaatttctgttttcaaaacaagtattaacagaatggactgtgcttgttaaagtcacaggtggcaatcatcaacaacttgttagacagtttgctctttaaatgcatagatttctaaatctaaaaattaggaaaaaaaaaaaaatgaaacctcatgcccaggtgtgaccatttcttgattgcatcctcacaggattttgggttgaaagaaaacaaagtccctgattctgccacagcccacccaagcatgtcctcagaggtggcattgaattgtcccattgcactgtcccctgttgtctgagactgcactgtgggccaaacacccatggcaggccccacggaggggactctgataccatgtcatctccactcagtcatctaattagatgttggtcaggtacccactggaggccggacagcacataaaggtggggagggggtttgtggggggcttctgatggagacgagtagaccaggtgagtactaaatgactcaatctagatgagaggaagaaagggtcataggtattcattcggaacccagaaggcctcagacaagtgctgtgcacctcgccctggacaacccagcagggtcaccctgcagctgcagggcaggctctgagcttgggcgggcacagactctgagcctgggcagcctgagggtacagagggtgccagaattaggcccctttcgttgcctttgggagatcaatgcctgcaagggccccgatgcagccaggtggaaggggctcagcgtggggacagtctctcccatgtgctggctggcctggggacagctttgcctctgcggattagtgtgagaggtcaggacccccatgaagccatgccccccccccaccaggacatgagaaggtaccagctcctggagttttgtgtcccaggcctggtcgggacacttgggctgccagggggcctggtcctgggccactctcaggccaactccaggctgaggaccgggagctggaggaaagggctggtggtctctgaaccactagcttccctgtggttcctgccctggtggctgaggttagtgcgactcccctcaatccagcccggtccagaacgttctgagttggggatgggagcttcttcccaccagagaaagcattgcaaacctttttgtggtgaaaacatccaaatggacagaaaactagagagggtggatccatgaccctatcgcccatcacccagtgggcccagttcttgactctgttttgccaagaagggggatcaagtccccagcttttgaagatatgccagactgggtttgaaaacttccgcttctctcagacagagcactttccaacccttggccctagtgggtccatctatgatgcggagacaggaatcccaaactcagagggggctgcgaagatctaatgaaggaacctttgtgaggggctccctggagaggcagacacactgagggtgaggaattcaggttggacctgtctccggccacagccagtccagggcttagcccatccttgctgtgtgccgcagccccttgctctcagctttgactctcacaagcctcaggtcctctgtaggcactatagagaggcgatagtcaggccccactccatcctcctcctccctgctgcccaccgaggttccttcaccatctggacatagccctgagcccgggctcagctccagtcccaaggcttgggcttgcagggcatcagctccagcgacctgccttctccccccatcgagggctgtgtgacgtgtgtgtgcatgtgtatgatgtatgtggttgtgtgtgtgtggtatgtgtgatgtgtgtggtcggcagtcagctgggtaggcctagacctgcccagtgaccccagggacaaaggagcagtcctttcggatcctcccagcgcagggatcctctgatggacaaggagacgctgcagtcagaggcactgtgttttcaggacagactgaggcaaagcattttggcaaatggccttggagccctgaacaccctgagaccttgtcaccgccaagcccccggaccaggtatacacagcaattctaaatttgctaatagcctcattaaaaagcaaaaggaaacaggtgaaattaattttcataatatattttacttaacccaatatatctaaaatgttaccatttcaaagtttaatttgtatatgactgagatattttgcatttctcttcatgctccgtcttcgaggtctggcatgcacccggcactcacagcacgtctcagtgggaccagcccggcttccaaggctcagcagccactggagacagcacaggtctagtgcagttgctctcaactctgctgtgcattacaatcacctgagagctttgaaaaagtgccagtttccgggctgcctgggaaccccctcatagttacatgggaatctcagggaggggtggggcagacaggggtcactgatcctggggtgggaggtgtcacagccccacggaagggcttcccatcagagggaacagcgtgtgcaaaggcaggggagtggggaagagcaatgtttagggggaactgtgagtggtggtgtgtgtgtgcagttgtgtgtgtgattgtgatgtgtgtgcacatgtgtgtgttgtatgtggtatgtattatgtgtgtggtgtatatggttgtatgtgtgtggtgtggatgtgtttggtatgtgtgatgtgtgcagttgtgatgctgtgtgttcatgtggtgtgtgtgtgtgtggtattctgtggtgtgtgtggtgtgtgtagtgtgtggtgtgtgtagtgtgtgtgtgtggtgcagtgtgtgtggtgcattgtgtgatgtgcatgtgtggtgtgtgaggggggtatattctgtggtgtgtgtgtggtgtatatggtgtgtgtggcgtgtgtagtgtgtgtgtggtccagtgtgtggtgcagtgtttggcatgtgtgtggtgtgtgtgtggtgtattctgtggtgtgtgatgtgtgtggtgaaatgggtggtgtgtgtgtgtggtgtgtggcgtctgtgtgtgatgtgtgttctgtgtgtgtgtttgagtggagagatccttcaacctgaaggatcctgagcctttctcttcaggacaggtgaggacaccttagctggtggctgtgtttcctgcgctggggagtcagccgagcggagccccaccatggctaggtgttacatatgttcagtatcacctctgacttcaaaaaagcgagcacccccatttccaggaatcgcctgggaaccgtttcaaaggagtcgtgccagccaggacagagagctgggaagcgggaccacaggagcaactctgaacagtcattggatgcgctctccaaccagctgctctgctcacctcaaagcacacaccaaagagagggagaggctctgagcccatgcgggtgaatcagggtgagccacgcaaatctgctggcccctggcagtcatggcagatgctgccaggaggcctccctcattactcggagtaggcttgaagtcatgctttccagtgtgaggtgcgcgagccaagcaaaggaggaggcctggtcaggaggggggagttccctgtgacaatggaatgaaaaggctgctgcagggcccagctggccctgggcacggtgtggggaggggaatccgcaaaccaggcagagccctccagcccagggcgttagttgttgacccatctttcctccccaccaccagactgggagtcctcatcctttgcgctttgcagtttaggaagcaatctctgaagagcacaaacctatttaacaatgataaaacttcggctttaaagggctgatgtggcacactggcactagagccaggacacatgagggagatctctcttctcctgctcagcagctggcctcccttctgagggcccacctcggactgactggaggacaccacttggaatggcaaagatgggggcaatgcaaaggccacaaggatggcttcatagacaggatgtggacttggcattgggcagacctggatttaaattccagctctgcctcagtctgttttccattaaatgaagatacttgtgcaagggttctgtgagaattccagtggctgaagtgtgaagcattccccactcagggttgcacagctgggactgggtgaacactgttagtaccctcaccctgtgtgctgcagctgcatcagggccagctgcccttctcacaagcacctatgcacagatagcccccatttcaccccaaaggacaactattcagagaattaccatccatcaagccagggcactccaatcagaggaaggtgtcacttcctggtaggacaactagaagggcaggagctattcactgagcataagaggaaggcatggtacaggtggggcatttgtggagagcaagacagggagcagagaagtttctggcaacatgctgctcccagaggaatagggctgccacacctggtaccaggaaactggggaatggccacagctcagctctgccactcaagaaccccacttgccacctgcataggaaaagacaacattgtggccacagaagggtgaggggccccacagaactggggatgccaggacacttggtccatgggaagctgccttttgctctggcctgtgcctggaagcaaaaccatcatccataactccatctaaggattcttagagcagatactagctggaccacaaggggcagcccaaacctttctgttccatcccatggcctggcccttgctggcccacagctcacagaatctgctggggctccccagctcaggcagtacaatactctgttgaccatacgctgacaggtcaggcactgctcttcctagttggacctgatactagtcatgattcactcacctatgcagaagcctgtgcatgcaacaaggcttagcccttctcccatggagatgaaccttttgttcctccctcctgctttcaccacccccaccctacccaaagaagaggaagaaaacagagtagctttggcaaccttttctacccctctcccaggcaagaaaagcagaagaacaacctgaagaaccaggcttctctcctatatcctccatctcgccttcagcctgcatcccttcttactaccctctctccattataatttgctctctgtacattttaaatcaatcaaattagcaaaataaatcatgaaaaccctatacatttataaacatagtaatatgtgatgctcataagatgcaaggagatgggtactttcatagtgttgatagtaggaatataaactgaaaatgctttttttggtaaggcaatttagccatttatatcaaaacattaaaaatgttcatccctcagacccaggcattcagtctcagcaatgtatcctagagaaatctaaaatacaaaagtcacaaagctcaatgcaagaaaatgttatcatcttgctaattacaaaagtggaaaattgaaaacaatttcaatttacaatatatggaactggttaagtaaatatagcaatgggatacaacattggacaggctctaaaacagtgtttaaccagaattattaaacattcattttgtagtatgaagtgactatagcaatgtaatacaacattgggtagactctaacatggtgtttattcagaatttgttttgttttgttttgagacagggtctcactctgttgcccaggctagagtgccatggcatgatcatggctcactgcagccttgacttccccaggctcaggcaatcctcctgcctcagtcttctgagtagctgggactgcaggcatgcaccaccaatcctgtctgttttttttttttttttttttctatttatttgtagagatgggatttcaccatgtttctcaggctggtcttgaactcctgagttcaagtgacccgcctgctttggcctcccaaagtgctgacattactggcatgagccactgtgcctggcctattcaaaattctaaatgtttactttgtagtgtaaaatacatgtggtaaatttattttaatatggatcctataaaatttcatatacagtatcaatctcaaagacatttaaaggtttttgtttcaaataataggaaattgaatgaaaaggaataaagcaaaatgttgactggttgtcatcaagtaataactgtgtattatttattttcattcatatattcctaaattttctaaaaggtttatactgttttgaattttttttaatctttaaggaaatcaacttttatagcttagagtgggtaaattttaattaatatgttccttttgtcaggaatatttgcaatctaaacacactttaaactttggcttttctcttgtaccaccctgttgccatttaccaaactatagtattcacagcctatatgtttattattgcttcagtcctcattgattgtatcctatggactatgcacctatttaatcctcatacagagtatactctgtaaagtatgctgtctgacactgaaagtcagaaagtttgagttgcttgctcaggacaccaaaggtcatcagcagaggctgcttgatactgtcagtacttttcagatagtcactctatcagggctttagtccacagtgctcctgtggatgctaaccctacctgggattgctctccttttccttgagccctcctgtcttaggctgttttgtgttgctataacagaataccataccctgggtaatttataaagagaagaaatttatttggctcacaattatggaggctgtgaagtccaagagcatggcaccagcatctctgctttcatgttgcatcatcccatgatagaaggtggaagggcaagcaagcacatgaaacagagaagggagggggccgaacttgatccttttatcagaaacccactcctacaataacagcattaatccattcatgcaggcagagccctcatgagctaatcacccctcaaagcaccctcctcttaatatcatcgcaatggcaattaaattacaacatgagttttggaggcaatgctcaagccatagcacttctcaagaagggcaccagcagaatatgcttgtgatcgctctgaatctccatcaggtcatagcatggaatgaaggtatctggtttactcaagcatccctcccacggcctgaggtcccaagattggattttctgttcccatcattggaaagcagaggaatccttgtggaagtgcatctgccttcacaggaccacaccaggagcaggaattgtaaaatccacctctgctctcccaagagagaaggagagggagggaaggagcacatttggcaactgagagcatgcaacagaaaccattccttggagatcctatggggcaagcaatggaagggacactaatttccatctggaaaagatatggccagagctctgacttcaaactctggaaggaaggtgggggctgacccctattgaggatcttctgggcaccagatgctggactgggtatttaattctagtcaatttattgagggaatgagactccaaaaggtgaaataccttacccacagtcatgcagctggtaggtgacagagatggagctgaacccagactcttcctcttatccagtcacataccgagaccctgcattgccgttggaagctatttgcctttcttctcagcactctgggtgtcgtttgcgtgctctctctctctctttctctcagtaacttcagactagagaatggggtaccaaggtcactgataaggaagcccagggcctgggggtaaattttagtgagtcggcagtcctcaatactcagacagatcatcttcttcatgatgatgaagcaccatcaggagcttaccatttggagagataggatggcttaaccctgaatctgtgcctgactggggtctcataccctggggattttatagtgtaagctcaggaaagggattctgatgcctgagcagagagaatgccctaattaagaatgacggccagtttggacaatctccctgaatcccaccgacaaaagaaacaatggcttcccaatgacatgggtctcaagatggacttgggcagagcaggaacatgcaggggggttggtggtcttccaggaggcagggataaagcccccagcaggaggaagggccccccaaggctctccttcctatctctatctctggtcagtatgagactgagtcattcacttagctaaggaccagacaattaaagcacaggaacagatccaagcagatgtataaatctattatatggtgaagtcatactataggtcagtgaggaaaggatgagttccttaaaaaatatattgacacatctggttatccatttttaaagaaaataaagttaaattcctatcacataccatgtacaaaatttccagatagattgaatagctaaatgtaaataaataaataaatacacacacacacacacacacacacacacacacacacacatatatattatattataagaaaatgttgtgtaaccttacaatgaggatttctacttaaataaaataggaaacctaggcgaggtgtaatggctcatgcttgttatcccagcatcacttgagctcacaagtttgagaccagtctaggcaacgtggcaaaactccatctcaaaaaaaaaaattagccaggcatggtggtgtgtgcctgtagtatcagctattcgggagactgaagtgggaggatggcttgagcccaggaagtggcggttgcagtgagccaagatcccaccactgcattccagcctgggcaatagagccagaccttgtctcgaaaaacaaacaaacaaaacaaaacaaaacaaaacaaaaaacaggaactctagagcccataaagagaaaaactaacttgataaatttggttacataaactttttaaactcctgattttgtaagccattaaacagttttttactagactagaagaaaataattgcaatacttaaaatagacaaaaggtttatatccctgatatgaaaagtttatgaaattaataataaaaagacgactataaaacagataaaggacacaaagggcaattaacagaagagattatacaaatgaacaatagcatgttacaagacaacagtgttgggataatgcaaattaaaattcatcagtttagcaaatgtttaaaatgttggtaccagtagtctaattttgatgacactataaattgctacaatgattttgagaattaacctgacagttactgctgacattttaatctggatgcccttggatgccacttctggaaaaggccagggatcataatcaaaacattaagttactcttacatcacaagcatgccctgatcagaacagacactgaccacaataaccaacaagactgtagcatacttaaaaatagatgtatacgagtatgctccttgtacaattgtttatgttagcaaacaaacaagcaaacctggaaacaatccaaagtttcatctatagggagaagaataactaaattatgaaggatcatcaatctggaaccactgcagctctttaaaaaagaaaaagaaggtaaaactactattattgccctggcaggatatccactatagctgtaaaaaaaaaaaaaaaaaaaaaaaagtttagaaaataaaaataaacaaaggaagtaattcaattgtagctcttcaaactgagatggtaataacagcaattacttaagtacagtgtaattatgtcttcctgggggttggttacatcttggcaaagtttatcacagcaagaattggttttggcttctggggttggagccttagattggagatagaaaaaaaacctcaaaggaagcattcctgtccagaaggtaaagtgattcccacccccctcttccctgctacaaaaggtcatggctttggggggcactgaggtctggcatcaacccttaagtttatttttcccataaggaaaagcacaggagtctcatgctagcactttagagaaccaagcatgtggatctacagttccagggaagtccctgactcggggacacccttctcctgaaatccccacactcagtcagggccctgtcatgtgttcccatggcccccagttctcttcttggtggcacataccacacgggtcatttatgttaggatatgtacctctttttccctccatgagactctcagggggtcaccatcatccccagcacctagacagtgcccagagctttgcatatacagggtaaatatttaccacgaataaatgaaattagtaaggggctacaagaacccaagatgattgaagagatataccaagaaatgatcaaatgacagccagagtgtcagtcactcagctggttccaaatgcctaataaaaattaactccctctgtccttaccacagccctatgaggtggccacacttattgtgctcactttatgatggggaaacaggagcatagaagttgggcaactttccaaagtcacaccgtgagcgattccacaacaaggggttgaacccaggctgtctgggtccagaggtcttgttcttaaccacagtgggctgctgcctcttctccctaagctagtgcatcctggaggtcctcagaatgacttgaactggccagagggtaaacgtctgctgaaggaatgaatgggcaatgaatttctaggaacctggggccctggggtctgggaaggccgttgcctccccaagggaatgacacagggccagtctgctctccttctgtgtgggcccctggacactggtctggcattgtccagacaccaaagcacatccgcatagcatgcatcaaacaaatggtgacctgctaatgaggaaatggctaaaacaggaagccatgaccagagtacatgcttcatgcctccagccccgcattgggtaatggaagggcaattacttctccacctcttcacctatacagggcagacttgcctagaagttcagagtccttcctgccaatttggcatcctttcttccagagtgttcccaggctaggtggggatgggaaaagccacaaggagcacagcaggatgatagagatgtggccaatgggcaatgctggcactgccaccctggccagaagagctcactgtgggacactttctcattgtttactagggaagaggaggttggtttggaattcattttgatttgttgttgtaaattctctttgctgtcccaatttaaacaaaaaagaaaatggagaaggggagtttttaatcaaatggattttcacttgggttttatcatgaacctggaactgctttgaaagctgaagccagctgggcttctgggtcgggtggggacttggagagcttttctgtctagctggaggattgtaaatgcaccaatcagtgctctgtgtctagctagaggattgtaaatgcatcaatcagcattctgtaaaaatggaccaattggcactctgtaaaatggaccaatcagcagcactctgtaaaacggaccaatcagcaggacatgggcggggccaaacaagggaataaaagctggccacctgctccagcagtggcaaccagtccctttctgcactgtgggtgttttgttcttttgctcttcataatgaatcttgctgctgctcagtgtttgggtccgcgccacgtttaagagctgtaacactcaaggggagggtctgcatcttcactcctgaagtcagggagaccatgaacgcacctgaaggagcaaattccagacgcccacctttaagagctgtaacactcactgtgaggtccacagcttcattcttgaagtcaccaagaccgagaacccaccagaaggaataaattcctgacacagcttgattttgtctttggtgagaattaagaagggtcacatccactgatgaccagttgggggatagatttacactggctatgcccagtggtactcaaagagccacaattactctcactgtggagcttccttcagtgacaccagagaccaggaagggagctacctaggagacctcagcctgtggaaatcaaactgtggtgtgagccctcctgttagcgagcagtggtgctggctgccttctcacactgccacttggcaaccagaatacagggacttcaccgtgagtttgagctaaaacttgcctgctagtgaatcttagcataggtaattttgggttaggagaattttggtttctctgatgacttggttgacatctttgagattcagcaagccccaattcagattagacttaaaacttatcagtgcaagtcagacagcagtgattactctgcttgttgagacctagggacatccgtttgaattcagtccgcaccccatggacgagcccagctcaatgccaggaagtttatgaattcctggggccttctagtctcatggttacatctgctgccaaaaaccagatcctatgaagttagttcagtttagtgatcttctcaccaagctgcaggggccatcctgttttgtaccatggtgatgaggcacagagcacaccctctttttaccttcaaagaaagaagccagacattgatacaggttactgtgtatgcagcagactatcctgaaggtttagggagacagagtattgatatctcagatctgcaaacaacagaacagccccttggggatcactatgatccaggcagaaggcagaatttgttttttaatcaaatcaccaattaatgactgaaaacagtatctcctggaacaagaaattattattcctctaggcttgaaacaatatgaaacagaggaaagttatttgcaaaaattggctgaatgtgcaaattatgcttccacgtgaatagcaaagtaattaaaaccattttcagaaagtgaactactttcttaaaacagcatgccgaaagtggtccagagttcaagattttgaaaacaaaaacaaagttggtacttgaattcacagattgaagctaactagaagtcaaagaaaagacacactggattatgagaaggagcagggatcacagccaggtgcagaacaaagtctgagcgtgcctgaccttccctggaggttccgcccatgtcacctgcccactgggtgtttcctgttttgaccatgcattccttagaccttctgttgttaaaattttttctccttgagaactttaactggccagaaattagaatccaattttgaaaataccaagctactttcattatgacactgcagttaagcaaatattacccaaatttggacagccttgtccaaatttgttttatattgttttatatttagcaatataaagcaaagtgtcccatttaaaaattggtaaaaccttataatcaatatgcattaaaaatttttagtatcacatcattattaatggcaaaaatttccatttataaataacagaacttttgttgattgtatttattcttccatcctgggatttggggttttttcaattttgttttttaagtttgtttttaattttttttttttaattcagaaagagaccttgttgccaccctctgcatactcagaaaggaaccccagtccgtgcagaaaggggccacggacagtggctgtccacccaggatgggcccaagaaaggagtcgatgtcctgaaacagtccctgcccctttcctgagtgttgggggatggtgggaacgacgaccatgtagctcctaacaaagggcgtctgcctctgggggtgtcctggggcgtggcttactgagggcttactgaattttaaaaattcagatttcagccaggcacggtagctcacacctgtaatcccagcactttgggaggccaaggtgggcggatcacctgaggtcaggagtttgaaaccagcctggtcaacatagtgaaaccccatctctactaaaaatacaaaaaaattagttgggtgtggtggcatataattgctgtaatcccagctactcgagaggctgaggcaggagaatcgcttgaacctgggaggcagaggttgcagtgagccgagattgcatcattgcagttcagctgggcgacaagagcaagactctgtctcaaaaaaaaaaaaaaaaaaaaaaaaaattcagatgtccagcttttcatgaaaaaatccaaagttctggtcacacgctggacaacaatagccataggtgagcacctgctgccctgggaacaggcacgtgccctccaggtggtgaatgacccacttctctcaccagcttcaattgtgtccatctaggacatttggaactcttccaggctgctgcactcaccaatggcaccttcctggcctcatgggcatttgagtttgtactcctggccaggacctaatgctgcagaccagataacttcctgggttcttgccctaaaggaggagctgaagccataagcgcagacctctaatgtggctcagagacactgtggagagagggcagtccaggcccagggtcttgacggtcccgcccctggacttattaggccccctctgcatagctcatagtggcagtgataccagacgtcacctaaaccttcccactcctgcggcacccactaccattcagcctcagggccatcctaaccttaactccaggctcctctctcacatgggactattccagctctgactttagctcccatgaagaactggctcccgagtcctggctccccatccaggacccaggttccagtcctctcaatgggctctccctgatagaggtcaccttgggtctggtggcctaccccatttcttacaacatacaccccacaccagccttgggccagccacctcctttgtgccccagaatggctgtcagggaagaccctgcctgtgtgccccaacctgtgggcaaggcaaggcctagggctctgcccaccaggaataacagacccagctagggaaaggcaggctttgagatgcacgtgtgatgttgaccctccccccgggtcaccccaatacccgtctgcctgattctctgttgccccacagggtcccagagagtgctgagctgcacatttgacaggctatgtgcccatgggtccaatgtgtccatggatgacctgaattccaaggccatcaggaaaagcctattgtgttgggcccccaggaagccaagccaggctggctaccctgggatcttcagaggagagcagcctagcttgtacagatcccctccatgggccaggccctagaaatttcacacaaaaaaattatccttttttacagcaactcatgagagagaccatgaggataccattttacagatgagaaaactgagagtgaaggaggtgatgcaaccaatgagtgacagaacatggacatgaaacatgtcttggcaactccagtacccaagatttctccatgtcagctgtcagcctgcctggctcacaaaaccttcatccccagtgtagaaaggactgatagacaagttaggggcttctctctcacagggcccttgtgtgtgcccacccttcacacacatacacccattcacacatacatacatacatctgcacacacaaacacctatggggtccacacacatgcacacaaatacacgcacaaacaccctgcatatccacacatacacacaggcatattcacacatatatacgtgcacctgcatacaaacacacacatagacacaaacacccataaatatccacacacacacaaacatgcacatacacacaaatactcatacacaaacaccctacatgttcacacatacaaactcctgcactcacacaaacaccttccatatccacacatccatacatatatattcacacacacacacacacgcatgctcacacacacgagcagagcactggaccaggagcaggagctgggactctcgtcccagatctcccatcacacttctcaagccttggcttcctcatctgtgagatggggttgtgccgcctgcttcccagagtgttgcacaagcaaacatgcatgacagcccaggaagtgagaagggtgtataggaggaaagggtcctgatttttggcagaagttgcccagggagtagtgagtgctccacacctttgtatgtgctgtaccttctctctggagctcttttctcttcttctctggctggtgaactcatcctcaccttccagctccaacaaccacactttgtgttcctgatgtctccctgtagtggaattcctccaccatcctcagtgtccccagctcctgtgtgagacaggacttcctacactggagtgggacacgtgaatgaggctgcatggctcttcggagccggatgagtcccgacttctcctgccacaacccaagtcccttcacagacccacagcacagtctctcagaggtatcttttaaggccagaccctggccttccctttgacagcactgatgcaaagctcctgatgtgactaggagtttaagaaccccctaagtgcccctagctgcctggtatagacctgccagcctctgcccatcctgcttcatctgctctgaccttttgctctctggtggagtccttgccatgatggcctgggcccagtctggtctggcctagggaggcgcttttctgcccaggcatcagggcctgtcctcacgcagagttcagaacacacagaggcaccccatcactctcgaggtaggcctcacacctcgcaagtcagcctcaaaaaagcaagtatgaggcaggatcccctttctggctttgggtaggggctgcagttcctcttgccatgtggaagcttcttaaatattgtactacaatatttaaaaatattccctttgttctacataccattaatagatcaactcttctacagctctgcaatcacttctgacttggcaaagctgagcctgagctcagggaagggctctggcttcagccttgtgaagcagaaagatcgtggactctcgcacaggacccctgtttacatttctctcaagcacagcctcaccttctcagtcctgctccaaaaacaccacacaacttccagttctgagaatgcaccctgttctctcagccctgggctttccacatgctaaccccttctcagaacctcccttccttcacttcgatacctaactgatttctattctccttcaaaaccccattctaacatcacctcttctgggaagcttctctgacttctctgaggccctcccaggctatcatttccttcctgataatggctccttatagcactggccacttatatggaagtggtgcatttgagtctctcccactgcaccatgggttttcaatggaagagtgtgtgtatcattcctctttgtaatcccagctctgtcatcacaagatggaattcaagcatgtacctggtagttgatcaagctctatattcatagagcccaaacccaaacctaaaccaagaagaaagaagaaaataatagaggctagtctagaaataacatagaccaggctaattccttaataataaagacaatagagaaaatacttccccaacccttgctaatgccaatgggaaaaaaatagagaaatctttaaaaaccaaaattggttatttgaaaagattaacaaaattggcaaatctttaactatactgaccagaaaaaagaaagattaaaatcagaaatgaaaaagaagatattacctctaaccttcaaaaataaaaaattataagtgaatgctatgaacaattatatgtcaataaattaaatgacttagatgaactggagaaattcctagaaaaacacagaaaccaaacctgactaaagaagaaatagaaagtctaaagaaacctttaacaactaaagagatgaaattagtaatccaacaactaactgcaaaaagaaagccaagccccaatggcttcattggtgaaattaaacatttaaagaataatttgcgttttaaaaatatttgcatttaaaggagcttttaaagaaaaattattatcaattcttcacaaacttgcaaaaagttaggcataaacacttcccaactcattctatggggccattactattctgatactgaaattagacaaagacatcacaaaaaaagaacactactaatacctcttatgaatatggatacaataataacaaaatactagcaaactaaattcagcaacatataaaaaggattatacacaatgatcaagtgcagtttgtcccaggaatgcagggttggtttaacatccaaaaaatcatcaacgtaataccatattattaattgttctattaatactatattaatagaataaaagatcaaaacctcataatcatctcaatagatacagaaaaaaatgacaaaatacaaaactccttcatagtaaaaacactcagaaagaataaaagagaatttcctcaacctaataaagcgtatatactaaaaaagcagcaacaacaaaaaaaacatagataacatcacatttaatgggaaagacaacatgctttccttctaagatcacaaaagaaacaaggatgtctactcaccacttccattcaacatcatactgaaggttccaactattgcaattatataagggaaaaaaaggcacccagataggaaagaaagatgtaaaatggtctcaattggcagatgacacgatttttctatgtagaaaatcctaagcaattcacaaaaaaattaaaatatgtaaatgaattcagcaagattttagcacatgagatcagtttgcaaaaatcaattctgtttctatacactgtcaatgaacaagacaaaaatgaaattagaaaaataattccatttacaataacatcaaaaaatacttaggaataaagataacaaaagaaatccaaatggtatattccgaaaaatataaaacattgttgaaagaggtcttaaaagatcaaaataaatgaaaatacatatcatgtttttggaccagaagacttattgttaaagatagaaatatcccagagttaatctataagttcaatgcaatctctatcaaaatcccagatgacttctttgcagaaattgacaaggcaatcctcaaatttatatggaaaatcaaggaatgcagaatagccaaaataatcttgaaaaaagaaaaacgaagctggagtactcacgttttccacattcaaaacttactagaaagctacagtaatctaaacagtgtgatactagcataagaacagatcaataaaatagaactgagagtccagaaataaatccatgatctatctacatacatctattgtcaattaactttttttttgagatggaggcttgctctatggcccaggctggagtgcagtggtgctatctcagctcactgcaacctccacctccctggctcaagcaattctcttgcctcagcctcctaagtagctggaattacagacacacaccaccacacctggctaatttttgtatttttagtagatacggggttttgccatgttgcccagctggtctcaaactcctgagctaaaagtgatccgcctgccttggcctcccaaaatgctgggattacatgcatgtgagccaccaggcccaactgtattgtcaattaatttttaacaagagtgccaagaccattcaatgggggaaataataatcaaataatctcttcaacaaatggtgctggaacaactggatatccacatgcaaaagaatgaagttggactcccatcttacaccatatagaaaaattaacttaaagcgggtcaacaacctacatataagagctaaagccataaaactcttagaagaaaacataggagtatatcttcataattttagctttagcaatagagtcttagatatgataccagaagcatgaacaacaaaagaagaactagataaattagacttcataaaaatagtaaactttcgaacatcaaagaaaattaccaacaaagtaaaatcatacatctaataaaggtctggtatccaaagcatttaaagaactcttacagctcatcagcaaaaacacacaactcaattttaaaatgggcaaagacttgaatagacatttctccaaagaaaatatacaaatgccaacaagcacatgaaaagacactcaatatttttattaattagggaaatgcaaatcaaaattgcaatgaggtaccaattcacacccactgtatatatatgtaataggtggatggatatatataatatttatatataattatttataatatgtatatataataatgttattatatgataaattatataatacatatataatttattgatttgagacaggctcttgccatgttatccaggctggagtgcagtgacaccatcacagctcacagtggcctgaacctcccaggatcaagtgatcctccacctcagcttcctgagcagctaagaggtactacaggcaggcataaccatgccctactaatttcttaatttttttgtagagacaggatctcactatgttgcccaggctggtctcaaattcctggcctcaagctatcctcccaaagtgctggcattagaggcatgagccactgcacctgacttaggatggatatatttttttcaatggaaaataacaagggctaacaagaatgtagaaaaattggaaccctcagacattgttggtgagaatgtaaaatggcacaactgctgagaaaagtttggtgatttctcaaaaacttaaatatagaattatggtatgatcaagcaattccactcctaggtatatacccagaagaactgacactgactactcaaacaagtacatgtatctttatagcagcactatgaacaatagccaaaaggtggaaacaacccaaatttccataacaaatgaatggataaacaaattgtgatatacaatggaataatagccataaaaaggaatgatgtactgatacatgctggaacatggatgagctaccaatttacaggaaacacagaggacaggggacatgttgaatagcaccatgagagtgcagtcagcaaaatccagactattggaaactctacagatcaaatgacctgggtcttgggagggggtaggaaaacctgtgtattaaccaacttttaaaagatgtatttttataaaataagtgagatttaattatagggtgtagggatatacatgtgggtaataattagactatgaagcaaaggaaaggagtgtctactgtaagtcaaggtagtggtgactttggagaagagagtgaggaggtgcctctggacaaagttctgtttcttagtctaggtggtggttacaaagctttactcttgtaaaaatccattaagccatgcatttgttttatgtggcttcttatagctttgtttatttgcaaataataacctggttcagagattctgattcacagggtgtggggcagagttcaggaatgcttttaaattttcccgtgttgtgtgcgcacacacacacacgcatacatatatatctgtcttccacaccaggctggtgcctgtttgaggaaggtctgtggcttgcctcaatttggacttcccaacctccagaactataagaaataaatttctgttctttatgaattacccagcctcaggtattcttttatagcaacacaaaacaaaccaagacagcttctatctctctcctactgacctatgagcagggcatgctttgtttctgtctttgcattcagcacctagcacacagtaagtgctctgtaaatgctgatgaggctgggctgatacacaggtggactgacagtgggcataccagacaagatccagtggcccctgaagcagtcaactcacccacagcaatgctggagggctatgaacttcccaatctcactgaggaccacaggagcattccacctctactgggcagtaaaatccagaacgccggctgcagacattccacttagagtcatgccaacatcctctctgggccccactagcttaagacagagccacagacacaggcgtccagaattaagagtccatctcagccctgaggctgatttctcactacacactgaccctgagaaaaacttcagggactgcaaaaggcagccagaaacactgggagaagggagggaagaaagcgcctctgaaatagacagaaacactaatgcaccaccagtgcctctttcagacataagccagtccagctccccatgggcaggcccaggatcacacaggacactacaaaccaggtctctgcccaagaaccaggctgtaggggccaccagagcctcactggaacaggttaatgcagaatacagtcatgtacgtccaaacggagctacaggccttccccgttaaagacagtgccctccccggggtagaaaggaaaacaatactccttatcagcatgaccattgtatgttaagtcttgtgatgcatgtttgcaagttactccaagtaactatggatcttgtccccaactcaggccagccagctgacaggccctgaagtcagcagctacagttggctgattctgaacccagtgatgcctgctgtttgcagggaatgagatacttacttaattatctcaaatttaaacactcttatatgtttccttaatttaaaaaccatacacacacagaagtgaggacatctaaaaatgggatctgcgttactgatgtgtaagccagaaaaaaagaggagttctcaaatacactctgagctggacttcacagctacgccagttcctcaagtggttcgtggaggtgagcggcagatgcaggccagtcttagaatgtgaaaaatctgagagctataagacaattcaaaaacagacaataagtcaaatcccattgaattgtgttattttaaatataaagaaagaaatgtacaaacatttaacagaaaattagattccccctgtccccacaaatcaaatccaaaattacccatgtgaaaacttcacggcattatccactttccaccaaggcctccacgtgctcgttctctggccaggccttggtagtgtggactggtcaccatgtaaggacagccttctgtgagctgcagaccaagggaggtggcctggcagcctgttggaggccaggcaaggataaaatttactatcaatccttttttttttttttttgagatggagtcttgctctgttgcccaggctggagtgcagtggtgtgatctcggctcactgcaacctctgcctcctgggtcaagcaattctcctgcctcagcctcccaagtagctgggactacaggtgcatgccaccacacccagctaatttttgtgtatttttagtagagacagggtttcaccatgttggccaggatggtctcaatctcttgacctcgtgatctgcccaccttggcctcccaaagtgctgggattacaggcatgagccaccatgcccagccatcaatccctttttatgtataagaaataggctcagagaggccagatggcatggcccagtttgcacagtaaggtgattgcctgtcacggccaaatagccaccacgtccggataatccatggccactggtttctgtgaggtggtggagaggcggcctcagcctgagccctctggatcgtgggcaacgggtggtgtgaggaaactgtccagcagtgatctactgtccctgcactcccacactgcagggccaggggtgcatctgcatcccacgcggggaatgcctgggcatgaggcttcaagaagcacttagcaggaatgcaccgggtgctcagaggagccgctgtcctggcaggctttgctgtccacatttgcccctttgcacggagcctgctgtccctgaagtgctctgacctgtccacaggaaaccaggtcaggcacaaaataaccacccttgtctcaaagcaagggccctaatgcctccattccttcaatgccttttccttcagccaaggtcccctgcagtcttgtcctgggcactgaactgggtgctggggatgggctggattatgaggaaggaaggtctctgctctcaagaagaagtgggtcccccatcctagggcagaaggcactgccatcctgagtcagcttatcgcagctcagatttcactccctctgtgctgggccctgggaatggggagatgacactgccatggccctgccctcaggggctccccatcacgtggggaagccagacacaaaggtaaatttgggaggaagcccccaatgcctcataagctatcaaaaaccagagtccacagcaatgggaaaaacaaggcaaggaaggtaacctgcaaagaaacgagggctggggaggcaacacgcaaacagccagaggagactgtgaggaggccccccacagactcatcacctcaaagcggagccccaggaatgaacagtcagctctaggacgtgctaaatgccccaggagaggcacgaaccaggggaccactgacaccactcggccttcggaggtgagaggcggcttcccagaggagggcatattggctgagcaggatttcctcaggtagacacagggggaaaccaagcatcgcaactgaaggccaggtaacacagatctgccgaaagagacatcatgattttcaaacaagcaaacgaaagggattcattctattctgcaactgtcaggcatactcagaccaagagtaatctttcaaataaaccccagaaaatgaaatcacgtatgccatgttctagccccgcagtggaaagtggtttagcctctggtcccggagtcttgcctgtctcttctcccacccacctcccctgcctctctccccttcccagctgcccagaaggtgactaactgcatgtccacttttttttctgctgattcttcccatttctgatattaagtagcactttctctgcaagcaaagctacactgatataatacagatgaaactgggaaagtccaggctaaatttcaggatacgtatacagaaatgcgttgagatacagcacctcactcagcaaccatgccttatagatagtgctaagcttcagtcgcatcacagaactttctaccctgcatgagttctctgacctggctgtgagcttcttgtgggtggggtctcagtcattcccaagcagccagatgtgtctcagtgcctggcatacagaaggcatatgataaatgtttgctgaatgagtaattcacaagtaggtccattgttataaatgaatgttttggaaacacaagctgtcactgagttccacgtgtcgtgttctgctttcgaatgacctgccctgaatatatctcacatgcagtcttgcatatgcctgattcagacttttgctcacagctacggggaggtgttgagctctgcatgggccagcagatccaggcagaaagacttccatgtctgtacagcagcatttgttcattgctccaatggtttattttcccctggttttattaaaatagtgaaaaacactaaagtggaagggcttacactcaagagcaacacaattggaatgacagcatgggttttcaggggtgcccaaagaagtccttcccctctgttgtatgtccctaggtcttaagccactacactgaattcatgtgtgaaggaaaggaacaaaattcaagggtgtgtatgaaatgctagcaatatagccttgaatgctgtacctggatgtagagcaggaagcaaggcttgtaccgtctcttccttacctctctgagaagggaccccaccccaaattgatctgctctggctccgacacaccccctacatacgacccactctgtggaggcaatagggaagtcctgctctgtgtctgaaaatgtcaaagacagcttattcctgggaagccatcaaatacgccctgctctgctgtatatattattcaagtactcagtaaaccctttgtttctggagagcaaaggccactggcagcccaacctctgcccagacaaggaggggacaggcagggagctggcaagggcacacaggatcatggccagagggtgagctcagtgcccagaatctgtccccataggagcacagggtccccaggctttcaattctccagacttcgtttcccagcctataaaatgcgtacaaaactgacatcctctcgggatgttaagattcgatgatattacaaatgtgaaagcactttggaacccataaactgctgtatcaatactggttgatcgtgctcttattaagattattctattaataacccatctcaaattacatatctgtagacagtgcgtttgtgcatctattgggccagctgctctccaggccgggaagccagaaagatctcatggaggagctggtcctcctacttccttcccttgctaaggccaaacctgcccgaatgagcttcatctagagggcacctctcaggctcagcacctggagcagccctccatgtggacagccgggcctgtccagcccaaccagagggggccgtggattttgtccatggctgtttcccagactccatggcagtgatttagatgcccctgccccctggccgcacgctggaacatgtgcacctggtttctcccggcactgacctacttatccatcagttactcaactgtctactgacgtgtttattgagcatgtcccaaaggccaggtaccagaccacttgctgcatgtgacatgcagacacatatggaaccaggccagcccttgaacaatcacgacaagtgtcccaagtgctacaaaagagaaggaagggatgatgttgcagaaagtggggagggaggggcagtgctaacctgctctggggtctctctcgaaatttccttttgtttgtcctgctgacctttctatgcatgcttttactctgaagtcacaccttttcttaacctgtagaaaattctcggtcatgtcattctaccactccttctactgtatcttctctaccattctctccacattttctccttcagaacattggttgttaaaactcagccattttttaagttctcttccatagtttcatctccttctatctgtgagctgcttttagttttccattcgcaaattgtatctttgactagctcatctattgatttaattatcatagtttttatacctagatttctactcagttttttttcagagccaatctgttcttaatttataccttcctgggtttattttataattactttttatgaatgctatttcttcttctttgtgggtcttaagatgcttaaggctttttggttttgagatttttctcatatttccatttatttggcagtgaattcatctcctattattagttttgtaacctttcttagaattagttttttcacatgcttcaaaatgttcgcttgcaataggaattctgtgttttgttcttcccactgcattaacctcccagacccacccgcaccctcccaggattttgtcattgctcccatctggccttctagagtacccagtcccaaatgaggcttgctctgacagctccgaggttctgaaatgccaaaacggaggagttagccagtccagtcattggcccagggcctggcccaggaactacctttgagcctccctttgcccccttttgccctcttaggcatgcaggtcttgctagccttagccctggtagcagttccagtattttgcagccacctgtcacaggtggctggatctgccctcgctcccagttcccatagcccctgacgcaagtgagatgctttgggctctcaggtcctttgcccatgtcagagcccagaggtgtggtctcactatgctgtggaaccccagctgacagaaccactcactgcccagggatcctcagggaggttgagaagggaaagcagattgctttaaaggccgccgttataaagccatagccaaagcagctgtggcctgtgaaatggacctacgagaaacacagcaagagagaaggtgtgaaaaccaggagcgcctctcagtccctgcatgaggaagcaatgtgactgtttgatggccctgagttatgtgggggtcatacaggccccttagctatatcatcattccaacagcacaaagacatgaaaaaacctacagtttgcaagcagctgccccagagacagactggcaacaccatgaggccaaatcatacaattgcacagagaaggcagcccttctgtgtgcctgtgcagccttcctccctcaactggcattgcacctagggcaggccctatgtccaaagtgagcagtgatatcagggttacttgcccaggtcactgaccagtaaacgacatgtatgtgtcaccggtcagttgctattggtataaacacttcttctgtaatatatatggcctagtatccatttgggatggttccaaaccataagttggggttctccaggtttggaatggtgcatttcagaaggtaaaaataccagaaattagactacaagaaaatgatgtgttagagaggagtgtggggtaaggagactaacagcagagaggcaggcaagattcaacattttgagatttattttgtgttattggcaagccttcataggctttttagcagggtactaacaaggaaatatttaggaagaaaactggtagccacatggatgagctgttggagagaaagagactagagacagtgtctggagtcaggccagccccaggttccagttttatactcctctgtaggtgcttttgttccaaccttggtccagattcactcctaaattcatcagggtttccactccttgaagtcaaagaggtctaatgaacacagcactttatgcatattacctttctcagccatcaaatcattacaaattagaacttggaactggagagagcaagttacttgcctaaggacacagctattagacaggtgtatgggcttcccaagtgatgcaccaatcctccctctccccaagcaggatgcagagggcagcaagggaggggttccaaatgggtgatgtggtgctctcgcagcaacccaaggctcaggttcagctctagccctcagtactgagctaaaactggccaggtgcagtggctcatgcttgtaatcccgtcactttgggaggccgagttgggcagatcacttaaaggtcaggaatttgagaccagcctggccaacatggtaaaaccccatctctactaaaaatacaaaaaaaaaattagccaggtgtggtggtgtgcacccatagtcccagctactcaggaggctgaggtgggagaattgcttgaacctgggaggcggaggttgcagtgagccaagatcacaccactgcactccagcctaggcaacaaagtgagaccttgtctcaaaaaaaaaaaaaaaaaaaaaaagaaaagaaaataaaaagaaaaaagacagtactgagctaaaactgaagacagttagggaggccctggtcatcctctcaccccttctcccttcatgtccattcacccccagccccaagcccagccagtggtcactggggccacacgtccccatctttgtgctttgcacatgggtcctctgacccagctgcctcccacctggatctgcctgaagaactcttcaatatacagcttctgttatcagacgctcatttcggggggacagctgccacaagtgtggcctctgcagccagagatccaagttcaaatcctgattctgcctctagtgagctgtgtgatcacagtcaagttatttcacttctctgaatctcagcttttcatctgcaaaagctgtcccaaggtcattttaataaatgcatacaatagctgctgcgaagcgctcagtattgctgagaactactggcgtctataaagttctgagtcagggttaacagctgtggcatgtatggtaattgtttgcttgcgaatcatccttcccctcagctgcctgtgagttcctcagggagaggagccatctttgattcagggctatgttccagtgcctgaaataaggcatacctcggaaatgcttgttaaacaaaggaaggaacgtgagagtgaatgatgacaactctctttgccaaacattctaccagtgactcctttgcgaaaactggctgcaggatggtgattttgatttgctgtaaacctagtgccaattgcttccatctgagctttagataggtgaagagcctcccctcgccccgggagtgtcacatctatagccagggcaccgtggataatccattaacacggattccctctctgcagcctcaatgaccctgtcagttcccagctgctaagaggttgcctcagccatgacctgggaccatgaccatcatacctgattcacctggacctcccacttggacaccctacctggacaccccacctgggaatcctacctggacatcccacctggacattccacctggacatcccacctggacatcccacctgaacatcacagcttttgccttcctggcttcagaaaacctaaagccaagcctggccacaccctgggagtagcagagctttggcctcacagaagcagcagatgtggagccaaactttactgtggcctgaggacctggctttgaacctagctctgctaactgactttatcaccttgggcaacttacttagcctttggggacttgatgtccatttatctaaaatggaaatagtgctagctatcgcttcttgagcactcatcaaattgacagggaaaggcctcattgttatttctattcagcatcgccttctcaggagcatgggtccaggtttctggaggatacctgaggaccaggagccctgatgtgtgggccgcacgcccacgtccctgcccagacaggcctcccctcacattgcaatttcagtccttggctgaaattcagtcccttggctattatactgctcccaggtggggaggagttgagagttagagacaggaaagaccaagaagaggaaggtgggagaagactcctctctgtgtttataaaaatgcttttggatgcctgctagcatcagaaagattttagctgccaattaacaaacagtggccacagctgaaggtgacaagatgttccttgcatcttaagctgatgctactgtttgcaagacatgagccttacattatgtcaaaaggtgtttactgaatgaatggatgaatggatccatcagctcacaggattaattaagattttcatcatctgaatgtgaaattatgtccatgtgcagagcctccattcctgcccagcggcttcatcacagccaggtccctgtctctcctgggtcccctcaatggctctccttcctcccaggtgtctggggaaggacagcagcagtaatccagggacagcctttatagcggatgaagcactctgccagacaccgctgccctatctctataggattctcatctccactgggagaaaaatacttactattataagctgcctcaaattatttccaacaccactaaggaactcatggtaaaatataaactcaataaagagctgggtatggctcttaccctgaggatagggtgcagctgcgagctgactgttctgagctctgccttagaacagagtggcagtgtttcctagtgcccaggtgactctctctgctgggcctgctgtggctcagccctagatccaacaaagagagggcaggagcacagcctaggccttcttctggcatcccagctcactgtgggttgcaactcaccagtgggtgtgaaatccatcacgactgagaccagtaagtttttaatgaaatgaaatacaaaaaaaaaaaaagttagagtttgtatatgcgtgcatactgtgtcacaccgtaatttgttttttttttgttgttgttttttaattttattattattatactttaagttttaggatacatgtgcacaacgtgcaggtttgttacatatgtatacatgtgccatgttggtgtgctgcacccattaactcgtcatttagcattaggtatatctcctaatgctatccctccccccaccccacagcagtccccagtgtgtgatgttccccttcctgtgtccaactgttcgcactgttcaattcccacctatgagtgagaacatgcggtgtttggttttttgtccttgcaatagtttgctgagaatgatggtttccagcttcatccatgtccctacaaaggacatgaactcatcattttttatggctgcatagtatcccatggtgtatatgtgccacattttcttaatccagtctatcattgttgtacatttgggttggttccaagtctttgctattgtgaatagtgccgcaataagcatacatgtgcatgtgtctttatagcagcatgatttataatcctttgggtatatagccagtaatgggatggctgggtcaaatggtatttccagttctagattcctgaggaatcgccacactgacttccacaagggttgaactagtttacagtcccaccaacagtgtaaaagtgttcctatttctccacaacctctccagcacctgttgtctcctgactttttaatgatcgccattctaactggtgtgagatggtatctcattgtggttttgatttgcatttctctgatggccagtgatgatgagcattttttcatgtgttttttggctgcataaatgtcttcttttgagaagtgtctgttcatatccttcgcccactttttgatggggttgtttgttttttcttgtaaatttgtttgagtcataatttgttttttgttgttgttttgctattttttgagacagagtctctgttgcccaggctggagtgcaatggcacaatctcagctcactgcaacttctgcctcccaggttcaagtgattgtcctgcctcagtcacccgagtagctgggattagaggcacccaccaccacacccagctaatttttgtatttttagtggagatggggtttcaccatgttggtgagacgagtctcaaactcctgacctcaggtgatccacccgcctcagcctcccaaagtgctgggattacaggcgtgagccgccatgcctgacaggtaatttgtatttctaactgtagattgtagtcaaagtttgaacgggtcagccatgcgcacaatgccagcctgcctacaaatgtagactggggcctttgactcatgcctgtaatcacaatattttgggatgtcgaggcaggcagatcacctgaggtcaggagttcaagaccagtctggccaacatggtgaaaccccatctctactaaaagtacacaaattagctggatgtgttggtccacaccagtaatcccagctactcaaaggctgaggcacaagaatcacttgaacccgggaggtggaggttgcagtgaatcaagatcatgccattgcactgcagcctgggcgacagtgtgagactctgtcccaaaaaaaagaaaaaaaaagagtaggttgggaagccagtaactaggaacaggctccatttaatccatcacaaaaagaggatttgagcagagaaggcaaagacaaacccttgggcaggcagcatctgctctgctggacaagctgttttcaaccatacctaatgatggaagcagggactacattgtccaaagcaaggatcttgggacccagtgggggctcaacgcagcaaagggctgctgatatgctcatctaagatcctgatgggtgcccgtttcttacagaactgtgtgctcacagctgtgctcagtgggccacatggtcctgcccgtctggccagcccatcttggttccactgtgttcctggagtccttactgctaggctctggctgatgctagcccctgtgatgggctgcccgccccacatttcccctggctggtctccactctctcggctactccctgctctgtcccataaaagcactcaaggcagccttctcatctagatcattctttaggcctggagttctttaatctgagggcttttgcacaccctgaattggatgcaaaagggggtatttgtcccatgtgtgtttttctgggaaaaggactcacaattttaccagactctcaaaagcatctgtgccctcagcaaaagccccaagccctgcctcaggaagcctgatctgctcaggctgggtgactatctgtccgtgtctgtcccccccaaagtggcgttcagcaactgatgctggggcaaactgccctgccatctgccagaatgtaaagcatcagctgtgtggaggatgggcggggggctggaccccagccaggccctttcaaaggcactaggggtttggctctagcatgcatccctgttgtgggtggcaaaaaccactaccgggagtcaggctgagctggcttaaatcccagttctgtctctggctcattctgcctccataggcacctgtttaacctctgtgaggctctgatttctcatctagaaaatgccgataagaagatgtaccttccaggattattgtggcaattaaatgagatactgtaagaacagccactttaccgcctataaatgctattttttttaattgactcagtgaaaaacattttaccattttaaataccctcaacccctgaagcactgcagctcttagctctatgacctcaggaaaattacttatttctgtcaactgtcctacttctgacaaatggggatggcttcatgttggtgttcgcaagatgacaagtcaacacgtaggaagcacttgaagcagggcctgggtccttgtacagtcttgcactgttatttctgcaagaaaggagtggcaggtgaagagtccctcccttagactgtgcctaggagcaaaattgccatttctgtctgtcttagtccattttttgttgctataaaggaatacctgaggctgaatactttataaacaaaggaggtttctttggctcacagttctgctgggtggaaggttcaagactgggcctctggtgagggcctcaggctgcttccactcatggcagaaggtgagggggagccggtgtgtgtagagattgcatggtgagagaggaaacaagagggaaagagagtggtgcctagctctttaacaccagctctcacaggagctaatagagtgagaactcactcactacctctaggacagcaccaagccattcatgaggaacttggccccatgacccaagcacctctcaattaggccccacctccaacagtagggttcagttgttcttcctgcctcctgagatggagtcttgctctgtcgccaggctggagtgcagtggcgtgatcttggctcactgtaacctccgcctcccgggttcaagcgattcttctgcctcagcctcccgagtagctgggactacaggcatgtgctaccacggctggctaatttttgtattttcagtagagacggggtttcaccatgttggccaggatggcctcgatcttctgacctcgtgatccgcccacctcagcctcccaaagtcctgggattacagacataagctattgcgcctggcctaggggttcacatttcaacatgaggtttgaggggacagacattcaaactatagcactctctctccttgcctctccttgccgatgggccaccagaaatctctcttcccttcttcaccaaacactgctccacctagacagtggtgcagttgccagaaggcacatgttgcctagcacagaacctcccattctgtccgttttattggcactgtgggctcaaatgctaatgaaacacatggcaagacctcgaattcagtccccatttggttggtgaggaagaggccctactcactgactttgcattcatcacctctgaccccatcacgacctctgagacagagccaagaagcccattttatagatgaagaaaccaagcctgagtggggtaagcacttgcccaaggttacacagctggcaaagggcagtgaggtctgcctagacctcacttgctcctccatgccatgaagctctcttattcacctctttgttagcaaatgtcttaaaagcatttgaagtgcctgaaatgtcaaaatccagctggcatccccattagggagggctcatccactgagtggacagattatggtgacaggtacctgccccggtcttcccacacaccccagcaaggggtcatatgtactctcttccacagattgcacctcccgagttttctctctctcacacctcccttctcaccaccatacccttgacccagtaatttctcagaccctacatgtctccaccagcccacgtgcccattagactcaaggagaggaaacggcagaggttcaacctagcaagcccaagctctgggttttctggctttccctgagtgattgtggcagggggtgggtcactgaaggttatcagcatatcactggcttgaccctgggtgggaggcagggagggcttcccgctttgaggcgccccacccccacccctgtgaacagggtaattatggatagactgggctgagtgatggcctggggtctcgggcatctgcaggctgcccccaggctgaagcatgcctgccagtggcttttaggcccatatgagctggagggtccttccttccttcccaggctcacagaacccctgtggggctgctgtgagtcctgtgaggccacccactaagctgccaccccagccaggcagccttggtaggaacagcccagaccaaagggagattggagccaggaaattccacggtggtgggactggcctgctgtatgcacagattcaggctctaggaggccctgggaagggaagggccctgcccacacccacagtccctcagggcaccccctggctaggcttgtgtttcccccctaagaagacctttacagagcccaggctggagtcctggacgtgggtgcaggaagggaactcagagcttccaggcggggctggcagccacacctctgctgctcctctgccaggccctggcatggcagagccagcctgggcggggaacggcaagaggagcaggaagcagagagagggtttctgtgggggtgtaaccgcccaaggggttctcctcacctgctgcccagatagccgatttatcatgacaggagaattgtaatagagaaagactaattcatgcagagccagctgtatgagagaccagagttttatgattactcaaatttttaagtctccctgaaaattctgagactcaggtttttaaggataatttggtgggtagggagtcggaaagtggggagtgctgattggtggagtcagaaataaaatcatagagtgtcaaagtgggattattttgctgtcttcattcggttcctgggtggcatcgcagaactggttgagccagagtaccggtctgggtgcctgctggtgcattggaacacagggtctgcaaaatagctctagcattaatctgagtttttacaacagtgacgttagccccaggagcagtttggggaggttccaaatcttgcagcccctggctgcgtgactcctaaaccgtaatttctaatattgtgactaatttgttagtccttcaaaggcagactggtccccaggcaagaagccaagaagcggggttgtttcaggaaagggctcttatcatttttgttgcaaagtaaaactataaactaaatttctcccaaaattagttctacctacccccaggaatgaacaaggatcgcttggaggttagaagcaagatggagtccgttaggtcggatctctttcactgccatcattttctcactgttataatttttgcaaagtcattttcagggggaggaggagtttcagtgctggggcttggaatggcctggcatcctgccccaaggagcccaggaacccacctcgggctgcaatgggatcagagctggttcaggggtaagggtcatgtccagaacaccctgggactggcatggaaagccctggaggaatggcagcaagggccatgcgtcagaggcccatatctggccacccattttactcaacatggggccagagtcctgagggcagtgacttgctaagaccacacagaaagaatgggggtgagtgggaggagtagtgtcttccagattgagcctgcggaccagaggcagcctgagggtgtgaaagggccgtggccaaagagcactaaccctgctcaaaggtggccctctttgggccgggtctcaccagcagccagtgagcgctgtggtttccaagcaagctattcggagtgcaagccgtctgaggaggccccacatccaaacacagacacaggcatgagcgcgtgtgtgcattcacacacacacatgagcacgcccatgcacaccccgcaccatgcacacacacatacacacatttcaaccagaagaatttctcttttctctcttctgtatcagattttgatgactgaagccaataaaattgcttttttaaaaaggcagtggccacagaagaatgggcacctttgggagtcagaagccactgcaactccatgtcagggcacttacagctctaagattgctgaggtcaggaagtggcgagccgggttcacataccacacacataactcacaccctctatactacacataccccacacacaaacacacatcacacacacaaccacacacaatacatacaccccacacacacacatcacacacacagccacacatatcacacacaaccacacacatcacatacacataattgcacatgatacacacaccccacacacaaacacacacatcgcacacacaaccacacatgccacacacacaaccacacacatcgcatacacacaatcacacacaatacacataccccacatacaaacacacatatcacacaaccacacacctcacaccacatacacaccacatacatcacataccacacacaccacatataaccatacacatcacatacatcacacaactgcatacaaccacacacaatacacaaccacacatatcacatacatcacagtcacatacacacaaccacacaaaatacacacacccccacacaaacacacaaccacacatatcacacaaccacacacactacacaccacccatacaaccacacacatcgcatacacacaaccacacagaccacacacaaccacacacatcatacaaccacacacacaaccacacaaccacacacgacatgcacaccacacatataccacacaaaccacacagaaccatacacatcttattcatcacacatcaatcacacactacacacaaccacacacactacacacaccctacacacaaatccaaaaccacacacatcataaaaccacacataccacacaccacacaaccacacacatcacatacatacaacacacatataccacacacaccacatacaaccacacacatcacataatcgcatacaataacacactgcacacaaccatacacaatacacacactccacatacctcacacacaaattcacaaccacatacgtcacacacacaaccacacacaccacaaccacacacatcacattcatcatacatcacacaatcacacacaaccacacaccacacacagtgcacacaccccacacacatacacacaccccaaacagtacaccacacgtgaaacacatgccactcacataccctacacaatacaacacacacacaaaatacacacacagcatacacacatcacacacaccacataacacagcacgcactacacacctcacacaccacacataccacacacactctacataatacgtcacacataccacacaacacacacacttccacacaatataccacatacacaccgcacatacaccatactcacatgtgccacacacataccccacatgatatatcacataaacacacacacacttaatttggcatagtcagcaagataagtgagtacagtacctgcacgtgaaattggcatttggaagccccgggatgctcctggggacggaggactgcggggagaagacaatgtgactggggagcaccggccattggggaggagatggtgcgaccggggagaaccaggagtgtttggagggacaccccaagaaacgggtttccatgccctgtgtgatagcaaaggtgctccttagacccatcctgtgctcaatctaggactggagtgccagaaaccagacctaaaggcattggaagggaaatacagagatcctagcacaaggagtgaacagtgaggggaagaaggagcctccgaataggcctggagactggaattgccagcgttacacatttctaaattgtttttctgatgctctctctaagaggggaggcactatcactcttggataaaggcacagtgttacaatgtccttctgatggcacacttgcccaccttagctttaacctcacagaaggtgtgcttctgccaattgctatgcattgaccagcagtcatagtggagctgacaccaaggagctgttttctttgcctctgattccttctcaaaattgcaccaaatatttgccatggcttctggctggaagtaggaatgttgttctgaacaatattatggggtggcggtgagatggacttgagaggcatcccggactcatgactcatctctttccctgcatccccagaatcctgtcacattactcttaatggtccagaaaatacaaggactcctcgaaggatgaaagaagggatttggtgagcagaggaaactataacccacactgtgtgcagtggaggaccagtgagaaagtgtggggggcttatggagtgcttccagcagggaagaggcacgtagaaggagcagagggccctggagccacagcaggcaaacctcttgggaatatgagacaaaatactacacatacgaaaccacatttgttcattctccttgccagcagaattttacgaagcccctgactcagtggctgagtgcagccctccagaagaatgccctgaagatgataagcaggatagagcacaggctgccatctctcttgcctaaatcactacattttaagaaaaagataagttcaatgatcctagcttttgcctcttcttgtacataagacaatgttcaagaggattagagattatgcttctataatctataaccaggtgcacccaaacattgaggagattctgctctaatgtaacttctgagcacatgcaaaacctccactgccagtatagaagctgtgggctgccacattgctttggagcagtctagcagaagttctgtgaaaggctctcctgggttgcaatcctcagtgagacttctgaataaaactaactttaattatcgaaaagcctgatttttttctttcattgacaggaaccagagttgagattgttggctctgtcctccttcacccagcagcaggcaactttgggagcgggcacttgagtaggagtgtgaaggtagccccagaagcactggggacctcccatgcatagaacactaactactggcacactcagcccagtagaattctctccacctccccagccctggagacagccttcactgcttgcaggtaacaaagataatgctcactgaaggatctcagagaaccttaggtcaaagacaggtattcaaacaagacataaacaattgtgaaaaaagtcacaattgaataccagcaccaaggaaatagagttaattgaatgaagagattttatttatttatttatttatttatttatttatttttactttttgagatgaaatctctctctggcgcccaggctggagttcagtggcgcgatctcggctcactgcaacctctgtctcccgggttcaagcgattgtcctacctcagcctcccgagtagctgggattataggcgcagcaccaccatgcccggctaatttttgtatttgcagtagagacggggtttcaccatgttggccaggctggtctcaaactcctgatctcaagtgatctgcctgactcggcctcccaaagtgctgggattacaggcgtgatccactgtgcccagcctgaagaagagattttagaagaaggaaatatctcaagaggaatgaaagtatatcaagaacaagtgattatagaaatgaaataattagatcttggcaatgaaagatatgattgtcaaaataaactaaataacttaatgattaggattagtatcatgataacatacatagagaattagtgatgtagaagaacaaggcaagggatactccagaattcagtgcaaaaagatagaaaggctgctagtggtctaccagattccagtttcctcttctttcagagtacaaggctggactacatgcaggttgatatggccacgtggctaaattctgtccaatgaatgtgagtagggggtctgtgtgctgctgatgaactaagggcgtgccttctccctgctgtcctgcttcccactgcctatagccagctctgcaagcaggtgaggatggcacactagagatgtcagagaaatggaatggagggagatttgagcttgtcaatgtcaaataaaagataaaataaaagattagagatgaatgtctaatgaatgtctaaatttaaaacattttatttggaagcaagaattgcaaattggggcatacacacagagtgggtagtcttaggtctgttcaaagaacaaagaaaagatgggaggttttacaaaaaggataaatgttatgtatcatttgaaagaaagttattttgcattagtaaagttttggagagctggtggctctgactagtgagggatggtggtgggtagagtcacagcagattgttttagtagctgttagataaaactggtttcaggttacaacaggaagcttcagcagttgagcttgtgaaaaatgtaattcttggagcaggtgccatgtgcctcaagtaattttcccccccgggcccttcaatttggatttagtcaggtgtaataggaatggcccaatttgcataatcttctttcttatggctcccttttgatcaagatctttctccaaaaccattgctgatcaaccatactgtcttgggaaaagctgtctatcccatgaaaaacatcaatttctcattctggtgtgcagtttgaatgcctctggttatggcatcaggccttttggtgaactttctgtgtggcacatacatcagtcatgagacatgttccttaaaatttgtctactttcagctttagaaatagaacagttcatgttttggtaattttatgagggaaagttggattagaggaacccagaagaatttaggtctatactagtctataggtaaatagcaagaactcaaacacaatgtagagttatcatttattaagaggcatattataactttactttagaaacacaggttttaaaatttttaacattgatcacgtaagaacctcagatttaaaactttgagactgggaagccaaactgaggcagactttagattttgcttacagttttaaggttcctgtgccaggaaatgacaattttaatgtactcattgtaaggctggtaacccttgaagtcaggcattttgtgcattcttcaaatatgacattttagtcaaagccttggtaatataatcaattatattctgctatagaaagagaatggattttttttttttttttttttttttttttttttttttttagatgtggtctcgctctgtctcccaggctcactctcccaggaatgcagtggcatgatcttggctcactgcaatctctgcctctcaggttcaatcaattcctgtgcctcagcctcccgagtagctgggattacaagtgtgaaccacaatgatcagctaatttttgtatttttttttagtatagatggagttttgccatgttggccaggtgggtcttgagctcctgacctcaggtgatccgcccgccttggcctcccaaagtgctgggattacaggcacgagccattgtgccccgctgaagagaatggattttcattgcacttaggcaaataatcatattgccataagaatactcacaaatagtttttgaattctggaagaatcaagtaaggagaaaacaccaaatgcttttatctttgtttaaaaaagtatactttatcaaattgctgtaaattatagataaagagaaattttttccttaaatctggagaacaaaatatttaagacaagaatcaacaatgttttaaataaaagttataaaaatattatttttttttgagatagagtctcgtttggtcacccaggctgaagtgcagtggcatgatctcagctcattataacctccgcctcctgggttcaaactattctcctgcctcagcctcctgagtaactggaattacaggtgctcaccaccactgttcctctgttgcccaggccagagtgcagtggcacgatctcagctcactgcaagctctgcctcctgggttcacaccattctcctgcctcagcctcccaaataggtgggactacaggtgcccaccaccacgcctggctaattttttgtatttttagtagagatggggtttcactgtgttagccaggatggtcttgatctcctgacgtcgtgatccacccatctcggcctcccaaagtgctgggcgtgagccaccatgcctggccaaaaatatctttatcaattacttaattcatgtaattaatttttgtcctgattgatcttgattactagtttcatgaacccatcaatttatttagtagagatctggacatttttatttagtctattgatcttaaagttaacagaaacctgtatttaagagtatttattagaatcttttccattaatctgattgtaaatgtttttagagaagaattcaaaactgtggatgacaaaaacttagaatagccatagttaaaaatctgacgaaagtttataatcaacaaggaaatttcgttatttctattatatatagcattttaagataaccagaattatgactaagacatatttctataaatttgtttatacttttttctttttttctcatctgatatttttataaatttacagaattttcagaactttcatatcaacaacataccaataaatgcaactaaaagaagatctagtatcacttatcatttgacaatgttttttgtatgatttaccaaataacagtaatcatttaatatccccatctacaagatgagaggtatatctcttgagactttccagggaccaaattagaaaaatcccaaggttaattctaggtcatgaagacttaggttaggatttgattttggggaagtttgtcaatgatgtaaaaaacttaaaatatttgattgaaacagaatcacagatcactgaaaaataatagtcattcacttaactaaagcgatagttgaggtttcagaagcaatatagaaagttacatggatgtaaacaccttaacctttttcaatatcagtttttctaagtaatcaaaaacctaataaagacaacacaataaattatcttgataaaatggttttttttttttttggctcagtaaccaaaaagttaaaaagaaaatctgcagaatgactgtttctccttaccagaatctcactaatataacctggaagttgaacctaatgaaaaatatacttgattttaatcctacacaggaagaatatgtccaagattgtgagtatacactatattatagaagaatgtaaacaagaaaactagtaccttgagaaagaaaatacatggctcttagtaacagcatggaaaagcttcctggttacatggtacaattcagacatattgagaaaagccaagagtatagaatcaaattatactggaggaaaacattgcttttctaggcttttaagagaaacacttcagcatcagaccataatagcagaggtagaactggcgggaaaaaaaaaagatgtaagagttgacaaaaaaggttgaaggagagaattatcaccccagccaagcaaaaaatacaccttttcaaggggagaaagttcagaaggcaaggatcttttgctgcaagtcatgtgctgcaaggtacagcagaagttgaacttctgagacaaaaatttgagaaatttcaaaaggaaaactttacctcaaggaatgaattaccattgtaaataaagaggaccatatttttaagccaaaactagggaaattaattagatctcaggaaatgtggcagatactgacactggctgcagtttagaagattgttgttaaaaaaaaacagattttagaattaaaaataaaacccttttgcaattttattaagagcagaccaatacttcaaaaaaactttgttgttctaaatagggggccacatttttttggtttagtattagtgtatttttagtatcaaattttaatctttagaaacatttataaataattcccttctaattataaacaacttgatcatacacaaaatttatttcataacttccccctttatgaacctttttatgacttacttggaccatagttgacatacttgttttttttgcttttttctatacatcctgtttcttaaataactagtcgttttgctttaggacaacaatttaccacataagagtctttctcaaataaattatttttttcatattacttatattttgattaataaacctaaatatatttagtattattataaaattgaagaagccaagaacaaacttatatttatttagcaatttgttggttttttcttatttggatatgaaccggacatttaatgagtacctattatttaatttaccataactttaagattttagattacatgaaaagtttatttataaatgtttattctatttatagtcacctaatctttttaacaattatatctagagtttatatgtataatcatctaattttttttaacaactatatctagagtttactatgaaaattgaggtattagagctagtcattaagttcttttattagccaacttggtagcctgttaatatcaagtgtttacctaagtaagagccttaaagttaaataaatgggtatttggttgataactcacaagctatagctgtttttattgaatcaacaatattaaaataatcttacttatcaaagaattgcacaaaaatcattctgttttaggctgggttcacagctttataaccttaaaggatctaacagaagcaaataaactgtctaatcagttcacccaggcaaaaaatatatgttgacaattttgggacatttctaattttatgttatcaacaattttgaagccaattaatatatccaatatttacttaagtcatgtgaacgaaaaaaatttttgttcattgctgtatattttatatgagtgctcatttatctaaatagaattctttaaggaatttttggccagctatgccagattttgccatgtagacacaacataaaacacaatacatgtacatatgtgtaaacacatctaaacacatatacacacacaccaagatcttacagcatcagcagtaagcaaataactgtggaaatgactttaaataggcgtagttaaaaacagaattgacaagaaaatttggttatttctgtggtttacaataacttaacataataactatgattgatagcatatactcagacatattagaattttagaaaccccatataattttggaacatatattaatatcattcactaaaatatagcctgaagaaggttaaacattagtttttattttgacaatgcttctcatgtaacttaacatgtcaaataatcctgttaacctctcttttggatgcttcaggggccctctgtagcacctcaaagttagaggtcagaaaagacaattttgaagctgaaatttgattttgggaagcttatcaaatatgttattaaggtttaaaacacttaatattatgaaatagaatcccaggtcaacataagtcattcatttagccaaaatgatgactcaaaaatataaaaggcataaacctttactcattgatggagggaagacttagctttccaaacaatctgtctcgtctttcccttctttttttggtagtttattcaaaaggcaaacaaaaatgtttcatttttaaaaatatagcataaaaatcttgttcaagagagaaagccaattttagcattgcattagtgcattattgatgtcaaaccccattcttaataaaaccttatagacaaatatgttcaattttaatgtctgactataagataagattctcataagtcttttttataaccctttaccatttttgttaaagagcagatcagtgctctaaggaaactgttgtggttttattccaatgttcaatttacagaaaaaactgagtaatacccctttaaatttagccaatatgttcatacatagaatctctgttacaattaatttttcacaactgtttcacaacttgttcaaacctttagctttatcctaatttaaaacaatactttaaccctctaaactaggcaaaaatttacatttccatgccttgttataatcttttagtaaaagcacattttgctttcctcatacactttgcatgtacaactttttttagtagtcttaattacatgttacaatgttaattcttagcaatattaatttttggtgaaaaccctgttaagtaagtgattttaattacgtactaggtttggagcctaggacaccagacagaagtacagataaggtctgacccttttcagcatagctaggggagtggttaattccacatgtccttaggtctgacctagctgttaagcaggcaagttgaacaattttcaaaagccaaagaagcagtttatgaccttaaagcatttagtaaacctaatatctgacctacctaatttatttacttattttattttattattattttttttgagatggagtcttgctctgccgcccaggctggagtgcagtgttgcgatcctggctcactgcaacctccacctcccgggctcaagcaattctcctgcctcagcctcctgagtagctgggattacaagcatgtgccaccatgtccggctaatttttgtatttttagtagagatggggctttaccgcgttggccaggctggtcttgaactcctgactccagggatctgcctgccttggcttcccaaagtgctgtgattatgagcatgagccactgcacccagcctgacctacctaatttagaccaaatgtctttattttaccagtaatctttaaaactgtttttatttctcagagattactaaagtcacgtgaactacaaggcattacagttttttctttcaaaatattttatttaagccttatttttctttaagccaattacttagagttcatttatataaacatcacacacacgacacatatataactacacagatagaaaaagatccactagttgtaagatttttcatttgccagtttttaagtttcttaattagattactggcttcagggtggggtccttcaaggagcagggccaggaaaggatgcggtttctaggacctaataaggaggcacaactgaatgacaaaaacagatctccaaaattaagggtcccatttttatattacatcccagatccctaaaaagaggaaaatgctatagaagacagtgcaatgcttttaccatgcatttaattgcatggcaacccaaagccaatcagcccattttgcaatcagcctgtcccccgtgagagtcaattaatttgactcctagtagggggtggggatttttccgtaccttctaggtggccaagagcatgcttctctgattcaagcatggttagtatccccccataactgccattaaccatctctaaaagtatatttcctacctagttattacacacgaaagttctcttataatgcaagtaatttttgatacccccaaaactgaaaaccttcagataacacaatgcaaaatctatttactttcaattcctggggtttcatgaggaaaatcgagattttttcccaaaaccgggtctatggcacttcctctgtttttcctaaggagtcccagactattggaagttatcttaggtcttctcatgtgtgcattaagtgtggcaagaagacaaaatggagaaaaacaattcagttgactgagaagaaaaaacaaacaaacctattttcttcagaaaaataagatccaagaagggaataaaaacccataaaggccatttaaatatacatatagcttggatatatgtatccaagtcagctttaattaaactgacttttaaccacagcactcacaaaaatgttcttttaatttctcattactctagtttagccagggcaaacagccaatatatctggcttttaaactttaccgtaagtaactctacgagtgaaaccaacaaacctcaactaaggttatgacttaaccatgagtgtatgaggtattttcaatttttacaaaattaagaatcttcaaaggtagctcagagaaaggaaaatttaagaagggaagccagaagttgttaatggaggggaagggaatcaacaaacggtaaaggtcacagagatgtccaccagaatgtactcattctgtaagctaggatagaacccaggctgccattataaaatggcaaacccttagctgctgagctaaaacattgggcagtttccactgcttttcccacaaagagtctagagcaatcaattttgagcttgcaatggcttttaactactcaaaataatttttagagctaactatgatatgagccccaaaattccttttccctagatggcagagaccaagagaaagtactgccacactgttacaaggtcaagctcccaaggacataaaacaagatggagacctcattcagttttctgcttgtttcaggaatctgtagcaaagtttgtaaccataggcaaaagcctctcaattttgcaagttgccacccaactagctgcatggaggacccaaattaatgttttccattctggccagagaaaaatacatgtgacaaaacatagacattagccactctgcttagcacccactatcgaacttgtgaggctcaaacttgcccccagttggtccctatcatctttaatacattcaaagtggattaaaggagtttcaacatgtgatctttgggcaagatggacgcccttttaacagaaaagaaagggaaagaagagaaagggagaaaagcattgcctgtggcagagtggggaagatgaggagctcagggaggccagagaaagacccacccattgcagggatgctgaatcaaaagttcaggcggctgattgttggtcgtgaaggatcttttcgagcagtcccatcagctcccaaattttcccctttggggagaaaaagttccccacgttctatggcctggtacacgcctaatcctatcacccactggtgttagcaaagagtgcaaggcagatcactccaaagagaatagtggttaaccccatggtgccaaatccacgtttaacaaagagggactttactgagggggaaggcctccaacccaatcccatcctttaccaggtaaaatgaacccactactcacccaaagtcagcccattggtgctgcggtctatttcctttggatcgggatcgtaactaagctaaaaggctagcagatttaattttttaagtcaatgagtcgcataagctttcgatttgccttttgtaaagtctttaaataaaaatactgaaatctttttagaagcttctgcatatcaatagacatccctagatgagactaacttgggagccctcattttcaaatgcacttcagtgcagttttgttcatttggaacattccactctaagttatctttagtaagatttcaccatttctataagactgctgcttccggggcctaccacttatgcaggtattagccagaaggaactcagttcttcagaaattaaggatccaggccgggcgcggtggctcatgcttgtaatcccagcactttgggaggcgaggtgggtggatcacgaggtcaggagatcgagaccatcctggctaacacggtgaaaccccgtctctactaaaaatacaaaaaaaattagccgggcgtggtggcgggtgcttgtagtcccagctacttgggaggctgaggcaggagaatggcgtgaacccgggaggcggagcttgcagtgagccgagatcacgccactgcacttcagcctgggcgacagagcgagactccgtctcaaattaaagaaaaaaaagaaattaaggattcaatttttacctcagattttggctttgctctcaggttcctttgatcaacctagccaatgatttttctcctaccaaagtgcataagaaaaatgaaacaaggccgggtgcagtggctcacacttgttatcccagctctttgggaggccgaggcgggtggatcacctgaggtcaggagttcaagaccagcctggccaacatggtgaaaccccatctctactaaaaatacaaaaaattagcagggcgtggtggtagacgcctgtaatcccagctcctcaggaggctgaggcaggagaatcacttgaatctgggaggcagagagtgcagtgagctgagattgcgccactgcactccagcctgggcaacaaggtgagactgtctcaaaaaaaaaaaaaaaaaaagaaaaagaaacaaaggggtaaaacacaaaaatccctgtgaattttcaatagcctaattttacacccctgcaatattaccatttactacgtttctttctgacccagtcagatgtaagaggcctctaactgtatccaagccagttaattaccagatcaaatccattccttgaaccagcccagtttctgtcatgacttccaaacccagtttggaacagaaatttgctcaaagaaactcggagagctcaaaacacaaatcagtggagctctgacattggagagaaaacttaccatgacttccaactgctctgagagatcaacgaacacaaataggtcctgcaggtacctggcttcagtcactcagcactcctgggagtcgttagaagctctacttcagatctgctctgacaccatctgataaaagaaaaacttcagctgaattaaatttaaaggagcttaagtgagcaggcaatgaatgattcgcgaactgggcagccttctgagccagagtaggctcagagactccagcacagccacgtgatggaggaagatttatggacagagaaaggaaagtgaggtacagaaaacggaggtgaggtacagaaatagctgattggttacagcttggtgttcaccttatttgaacagggttcaaacagttggctacatttgattggccaaaactcattgattagcacaagtgtagactacagtctgtttacacctccacttgttatagttcatgatgtacagaaaaacctttaggctgaacttaaaatatgtaaggaggcagatttaggctaaattgatttattttttattatatttttaagacggagtctcactctgtcactcaggctggagtgcagtggcgtgatctcggctcatcacaacctccatctcctgggtttaagcgattctcctgcctcagcctcccaagtaggtgggactacaggtgtgtgccaccattcctggctattttttgtatttttagtagagatggggtttcaccatgttggccaagctggtttcaaactcctggcctcaggtaatccacctgccttagcctcccaaagtgctgggattagaggtgtgagccaccgcacccggccggctaaacttgatttaacagtacctttggggagataatttttttgtataatggaatagttactctaattataagctgctattatacctcatttggatctgggaattttctcatgtgatgtatgtacacacacacacacacacacacacgactaatattgcaatattcttttttgtctatgtttgtgtgtccttgtagaactttctatagcccagtctggaagtgtagggaaactgtatctgtttcagagtgaaactgctctaggggatgggaaattttgagtttattatttccatgagaaaatggaatggggcttcttttgggggaagatttaaaattatctgtggaaaaaagtgagttggacttggtaatgtaagatgagaaatttttcattattatattcaatgagatagacacaaatactggtttccttaatatttctgaaattgtatcattgactatgatagatgagactactgttcaaacatattcactcttctacctctccatttcactggaagagtgtagttactggttctattaatgttgggcatggctctgacttgctttggcctcagggtaggtgggggacagttctttgcctctcgactgtgctcagccatgtagcttgctttggtcaatggatgttagcagatgtgactcacggaggaatggaaattaccttgcatagctgggcttgtcctcttgaactgctgccatctccatgcataacacttctttgaactccttcagcctgagccccagatggaatatcagtggagaagtttaaatctcagtgaggagccaagtccagttggactcatagcttgaaacagagctgccccattgagctcgcctaggtcagctagccccagctgacctgcagtcatgtcaattgtatgtcactaagattttgtggctcttttttactcagctttagctaactaatatatcaccatatcagggaattttggtaggacaacatagctaagcacaatttgagatggggaatagaatagggtaaattctctgttcaaagcatatggtaatctggtgcctattttacttattatcccatttgtgcccttttttataacatgtctttggaagcgaaactgtacatccagtgtctctgtaacactgagtctattgtccatgtaacattcagtctactgaactgctttaaaatattagttgaatgacagtagactgaacgaatctctgtagttccagaaggcagggagaaggattgggagagtcgacacaaagtgtgcagccagggctgcgttggtatttttcctctgatgtgctccacagaatggcagctgacccactgtgggttgataatttcactggttcacagaagacagggaatataggactttagggaaataatgtgcctttgtctttgtctttctcttattctctatcaagggggaaaatgctgctctgggctggttggattcaagctcatggattggaccatgggataaagttttagtggcagatggctacttccttgaaatagagtggagaaaaagggtggcagcattggtgagaagggacaggcaggaggcagtagggaagtccagctttactctggagagaagaagaggtgggggtggggagggcagggccagctgtttggggtgggaggcagggaaggtgttggctgcccagttgacatctcttatctctttcctggggccagagtaggttattttacagcccagcctctttatggcctcagcagagaagcaaaggcaaacaaagaacaggtgatccctcagggcccaaggagacgcctcctacagcaggtgtgcccacttcagcagccctgctggccagaatctctacttagaaggcttctcggaaggccaggcccttatcggcttccgactttgaagtcctaggaaccctccctcacacctcccttctatgtggctttgaaaatactttgatattctatccctatcccttaattatttgaaccctcaccagtttgtaatgagcctgaacccatctttgctccattttacatatgacaaaactgaggctggaagcgttgttgccaagcttctttgccctttgtaccatgggatttaattacatatattttatggattctttcctttataaagttgtaatcattcattcttttttaatagagagaaatttagaaaaggaaacaaagcaaaaaatgacctaaaatcctatgggtcagataactcccgttgatattctttccttctttcccccagttctatttccagaggttaccactttcaatttttatttctgtttcattctataaagatgaagaaaatttttgacacctttaaaaatataatttaaatcatcttaaacttatagaaaagttgaaagtgaggataaagaacattaatttttctacgccatttgagagcatgatcccggcaatttgcatgaacaccttgctaccgcctcatctgcaggctccactaaagtttcatcagctgtcccaagatacacaggtttcattctcctgtctctggtctccttcaatctggaatggttctcccttctttccttgacttccatggccttatgtttccagatgacaggccagttattctgtagtgtgtccctcacctgggttgaggctgatgcttcttcagggttggattcacttgcatgcaccttcagcaggaagatcacagaagctgtgctgcgttttccttgcatcctgtcatgtggtgagtaatttcactctaggattagagatggtgttcgctatgatcatttgattacagaggtgactgccagccttctccactgtaaggtgactcttctctttgtaataaacaaatattttgtgatgaggcacactgaaaccatgaatatattccattcctcatcaaactgtcactttactccatcatttagttatattgaaatggactcagatttttattttattcagtaggttattatccatcatcattattatttactttgatgctcacatggtcgaagatttggccatcaagggccccttcaagccaggttctgggcttttctggcctgcacccttcattcttagagtacttcattactttctagctcccaagatctttcaggtttatcttgggctttcccagcccttgccctggaatcagccattttccgaaggagacttggattcttttaatggagaatggcatttagaagtcaatatatgggtgctaggagtgttcattgctattggggtatcactgctcctagactctctcagtggacagagcaaggatatatatgcacacacactattagatcaatatttatctctctatatagaaaaccatgagctcacttcaatactttcaattctaatcaaaaccacagggcttattctgggtttccctccttccatattcatgactgccttctccatgagtgagaaaactggctcccaactttgctcagttggtccccctgcatatacccaatcttccatagcagaactctgcccctccactcattctgtgtggctctgacatccacacttggttgtccccttctgccatgtggactttcatttgacagtacttggactctaacaccctgtgctaggccaccgtgcccctgcctccctgcatggccactctttgtcctattctggctctgacatgccatgccaggctcccccacgccagatgggtgccatctggtacatatcccgtgtgcttagcttagactacccgggctatgatggctactgtcccacccatgcccatgtgctgcatgcatcttatgaaggcatctggtttattctccctgctcatcagttcaatcagcatgtgctaccagtgtagtgcaccagcataccatctgtggatctgtgggatgttcagaagatcaaggtctctgtagaccacactataacagaaagctggaaaacgaacatgatctgggagaagacactgactttgtacttctatccttgccaggtgaaagcaaacttctgctggttcttaccgatatagatggggagaaaacacaagctgagtcaatagctacatattaagtgctgagagtggttaagttgttctatgttgcatttagaaaagcagctaaaattggagttactgcctgattaaatttacgacgacatacagtcattctccaagattcagcaacttcctgcacaggctaaagagctaaagaggtgagccaagtgggcagaaatgtgacaggcctccctgtccctgcatctttcatgtctttaatcatggcatcgatccctgtaattcccctagaaatacagaaatgcaggtttactatttgcgtagggaaagaaaatcccaggctcctgggcctgttcaaccatttctttgacctcatctctccttgcttgattttataccagttgtgctggagtaccttctaatatggtttggctctgtgtccccacccaaatctcatctctaattgtcatctccacatgccgagggaggtacctggtgggaggtaatcggattatgggggcagtttacctcatgctgttctcatgatggtaagtttccacgagatctgatggtttaaaagtgtttgggagtccctagcctctctcctgccgccatgtaagatgtaccttgcttccccctctgccatggttgtaagttttctgaggcctccccagccatgtggaactgcgagtcaattaaagctgttttgtttataaatcacccagtcttaggtagttctttatagcagtgtgaaaatggactaatacacttccttaatgaactctctcagaaaggattcaggaaatgtaagcttgcaagtttagaaatatccttattctacctttacacttgatattatcgctgagataagcgttttaggttcaaaatatatttccaggagtcctaaaaatatagctccatcttttcagagtcttccatcatcctatgttgttgacaagactgagaatggtctctgtctctcctttcctttgtaggcaacctttctcttcctgctcccacccatggaacattttagaatcttcttttttttttttttttttttttttttggtgttttgaaattttgcagtacctgtctaggtgtggagcagttccccgggcttccttttaatctgtagctctggaatactcttgctattgatgattctatgtgtcgactattttgctcacaccccacccagatgcattctctactgtggttctctgctcttccctgtgccaggggaagctgatggctcctttgctggcagggctccagttgggtttggtcaatgggagggactgacaggagactggaagtggaaggagagagaggttggtagaattcttttctacttccccttgcttccatgctgtctggaggcggtggcatgcctccacactacagaagctcccactgggggcccttcctctgcagtcctctggctgtggtaatgtggttttctccttttgttcttttaactgtagggtggtgattgcttctgtcttctgccagtctctgggtgcctcaccatttcttgtttctttcctttaacgcttcccacacctctgtaagttacctttttattaaaatccctttgtttgacaatctgggggtgaattatgtgtcctgtgcagactatgactgatatgctgcctttcattgtcttgatttttccttcctggaaattttagtaattggatgatgggtcattagtgttaatcatccatgtctcttattttagctctgaagttttccatctttctgtgtttttgctctacattatgggatatttcctaagctggttctcccatcccttctaatgatgtgttttcaaatttcagtagtcatgcttagttttcaaggattctttcttgctttcttagtctgtcttatttcacggcaatctgctcttgttatatggattcagtaatttctctaatttaggcattaaaggaagttttggtctcttaaagttattttctattccctaagttatttcagcttcttttggggtcagttattttgtttattcatcttgacctatctcctttgtgctgttgattttctaaatgtgtgaggatctttggttctctgttataagtactggaaaataaactggtttccccggatagctgatgtggcttccctctgctatagccttccatgaaaaaagtaggacagcttccgggagctagctatatgtgagtggaccatgcttggcagctgcccttcagaatgcacaggttgcgggcagggatggccaaggacatttctcagggagctgtgtgtatgggatgggtctctgagaatggagagcttgatgagttcaggccgtggaagcaacatctacacaagcctggatctgagaaactcaaccatactccctgaaaatggagagtttacatgcagaatgagtctgggggaggcagcactagaagggctgaaagaggaagagagtcagactgatttcagagggacccatcctagagggaccactgccatgactccatggggacatttccaaggggagccacaggaggtttcactggagagttgtgtatgtctgtccagtgtctaggaggtgctcaccatggctgagcttgcagggcctcttaggactgtccaggtgagatgtgtgggtcgtgatgagggtttggagaggtttccagctagaattggtcgggacagcccattagctctggggcagaggctcagggaggtgggcaagcatgcaggacacaggaatgcttatagccacagctctgcagggtgtttcttgcccataactgtgtggagagccattctcatctcaactcatttcttgccacaacatctcccgaagcaaactttgttattagctccgctttgcagatgagaatctggggcaatgcgagacggcttctgtgcccggcttgtgaccagtcaccacactgactctcaatgtggtgtaagcaactgtgaatgggcctgattccaaatcccagcaaatttacagtaaggagggtgcctggggtctatccatcccctgactagctgatcttcagcttcctcataggaccagggggaatactgagcatgcagtggactgaggttcagagaggtaatgtggagcgctgcacacacctgagggagttgtgcgcctgtctgacttccgggtgattcatgaggaacattcctgatggggtgggaagggaacctgtcactaagctatttaggagaatcagtctccagcaggtcacaccagccagccacttttatggcagaaggaaaatcctacctagccccttccccagagatggcagaatgcagcctggctgactggcagagcctctcaggctgtgctccggaccctggactccagcaagggggaagaacagcagctcccagttctttcttacagactgctttcttgaggagcttcaagtgctctggctatgattggtgcagggctctgctgcctccagagggtgctgtctcctttccctagcagaggcaaagggtctggcaggcaactctgggagtattggtttaacctgaaatgtctgctaggaagagctacctacccctctcctgggcattatggtcctgaaggaagagcttggactttggattgaaagtccagccctaccatctacaagttggctggctgagacaagacactctacttctttgaggctcagttttctcgcctgtgagatgggatgatcacaccacaccagttaggcatgaggatggactaagggcaggttcacatgcttctgcctggcatgggagctgtttgctgcttttaccaccatttcagctcttctgctgttctctgacccacaagagctagggttcaggctgcgtgccttgcgcagtagttctcaaatgtgtctatgtggaagcttgcctccaagggcttaccagcaaatccagaccccacacagctgccctgcaagaaggaggtgacagtggctgcgttcttgcctgcacagaggacgggtgtccatagagctcccagctggagttgagcagtttctggtcaagcaatgttctctgattttacatgtctggaagctaccattacaatcaggtcttcttaaatgtcctccctccctccgtcttcctttcttcctttctttctttgtcagatgctgtgtgtggacttgtgctgggatctggaggcggagacaagagctgtgacctagacataggggagtggggaacaaaggtgctcaggcagacaaccaactaggctgctacatctgcctctgcagcagagcatgggagggtggtaggaatttgtcatggcagcagggacatcggagctggggtgcaacagaggagcagccgctttccaggtagtcaagacaggaagcagcatggtccagaaagaagagatgacaggtgccagtctacagcgatggtgagcagaggcctgggggcttggcaggtgggttcgcatcctggatctggctgtttcttagctgagtgactttgggcaagttgctcaaccactgagtgtcactttgcttcatcagcacgatgggaataaaaatgcccacctctcagagctgttgtgatgattaactaaggtagtgtctgcagagtctatgcactacaaacggcagctgccattctagagggaccactgccatgacttcatggggacatttccatggggagccacaggaggttcactggacaggtgtgtatgtccagtgtttaggaggtgctcttgaagcagatctgttactctcaggaggttctctaagcacatatgtgactttgccatgtggggatggggggcagggaattataagctagtgtattcaaaacaggagcagcccttgtaagcaaagctgttccattatagccaagtcatgtgcatctcagctccaaaggagaaagtgaccattctcattgaattctcatcgccacaaccttgggactgcctgagataagacactccacttccagggcccaccctgagttttcactcacaccctggatgcccatctccttccctcaccctggctgacattctcagccacactgccctcccctggtctccaggggctgaatgctcccagcctcagggcttttgccgtggctgtgccatccatctggcctatcgaacccatttgctcacagcatctcaccccctgtaataatttatttccctctttccttgtaccctgtctgtcttctcccccagggctgagagctccagaaggaaccaaggacagggagcctgtcttgtccagctctggtgcccagcaggagagccaggctcataggaggtctgcaagtaatgtttctggacgaacttatgaaaggcaggtctttttatacccatttcatggatgaggaaactgaggcagagagagagagagacaggcagacgcacacacccctagacagagagaaacactcctggagaaagagaaagggagggagagagggagggggagggagggagagagagagagagagagagagagaaagaaagaaagaaagaaagaaagaaagaaagaaagaaagaaagaaagaaagaaagagagagagaaagacagcgcagctccagcctgcctgtatccagggttgaggtgggcgtgagagacacacgcaggcagggctgcagttccgggcaggccttgggggctcaagatgcggctccccagggcgagtgctggggtcccggggcaggcgggcggctggagcgctctcgtgggcgggcgcaaggggcaggctgggcgggcgcaggcgggagcgtagcagccgctccactccgcacgcaggcagcatcggggcagcaggagcaggtgaagcaggcgcggctctgccccgcgcctggtgccccctgggcacaggagtgcggccgggggcggggccgagtgggccccggtacgaaccctccgggaagccgggcgcgctgcctgcccttggcccggggcgcagagcgtcacactggatctggggagcatcctacccccactgtggacctcagtctcctcacctgagacatgggcggccccatccgcaccctgtaagccgcaagccaaggaggtaaggggtgcatctgaggtgtctgggcgctatgggcattaggatatagtagcttttgctgagatttcaggagacaaagcaaagggccttccctattctaaccccactgggagattagcattttgtgtatgattcattaattttcctctgattgactgggaaggcaggctgcagggggtccctgttggggcttgcagctggttctagtttttgtatctggagagctgcctggggacaaaatgcagagacaccattttattgaccttgcgtaataatctaccctccccctcatacactcgccacccccttgggtgtgcctgagggacttgaggtcccctggtcctcactggtcagtgtaccccaagcccagcagccccaggcagatgcccaacaccaccttttcagtgctcctcctcctcctgtcttggccctctctgccaatccattttctatatccaagtgatcttactggaatggacctgaccttgctggtctggcccaccactccagcttcatcatctgccaccctggaacctcttattctgcttacttttcccagcaggctctgctccttcctgcctctgtgcctttgcacatgctgttccttgcacttcgagttccctcctctccctgtccctttggctggttgactcctcttcagcctttgagccctgtaccattgccacctcttctctcacctccctgctccctgctccttctctgatctctcaactcacaggcctctctttcatattggtgttggcaatggcaatgagttccatctgcattcgtgctggtcagcccctctgctctgggagggccatgactgtataagtcatctttgcagcccttgtttctagcccagggcttgacacacacttattgagtgggtgaatgaagcagtgagcattttctggagccctcccagcccagtccttccactctgatcctgctttaggtggttggtttgggatgaatggtgtttctccacaccactggccaagccttgctgatggtcacccagagccttgggttctggcccatttgctgcttctgagtgcagtgcctctgccacaggttcatgcagctgggactgctctttatcttatattgggccctgtgtttggctctggaatagtttattttgccatgttcagccccaaatggccctttttgccagaagaccatagtgctggagaaatcttcctgccttcgagatctggttcctaaataaccagactgtaaactatcaggtgaattcacagcttgatcttttaaatgaccaaatgagactcttttttttttttttttttgagacagagtctcgctctgttgcccaggctggagtgcagtggtgcactctctgctgactgcaacctccgcctcccaggttcaagtgattctcctgcttcagcctcccatgtagctgggactacaggcatgcaccaccacacttggctaatttttgtattttcagcggagacggggtttcaccatgttgaccaggcaggtgttgaagtcctgacctcagaaactcatctttataagtagatcagatgcacagcgagtgacattcatgacagccgacaaatagagtttactgagctctggttgattttggccttgtgctctgcaaaaactgccttaacatagcaattgatcatgtaaaaaatacatatggccatgatatgagacttaaagaatatctcgaatagggttttctgctatagtgttttacaagatggggtccaagggccatgtgcatcagaatcacatagtctacttgttaaatacagattcctggcccccatcctggattcacttaactacatctcctggtggaagggccctgggatctgcactttcaacatgcttctagaatgattctgatgtttactgaaggttgagaactgcaaccctgtgggattaataatgactagagaatctgagaggtgagtcacaatgatgtatgtagtggtatggtgcttcccatgcaaaacatccatcattggcactaacacgggggaactctggagtctaaattccaactcagtcttggcagggggtccgttgtgctgaggaggtcctcggagaagggacagcctgtaccagggcatagagatgtggaagagtctggtgtgcttgtgagctgcacactgcatcaagtgacttgaacatagtcatggagtaggttctgtggagggcactgggcacctgtgactttggccaggtatgtctgtgcacatggtgggtagtaggaagaagctggtgtgctgatgagccaggctttgcatactgggcagtcttcagttttgccaggtatcacctaaaaaacaaggctaccagggcagggaggggctgagaccaggagggtgcactgattgtggatccccgaggctttagctctatcttgaagggaatggggtgccgtggaaggacacaagcaatcctgtgcagagtggcatttattgctgtctccattcagataaaatgtgacaaggggcattctacccatgttccctgaacaattccgtcactaaagtctgcatacagcactccaacttttttatcatcagaacagcctcatcctgaggccggagggaattagtagaacaagttctggcattagatgacctgagtttgtaactgggccctgttactaattagctgtgtgactatgggcaagttgctttccatctcagggtcttagattcctcatctatgaaacggattgataatatctacctctaggaataaactagctaatagacgaaagtgctgagcacagtacccagcatgcaacaagtgcttctaacaaggtagcaatcattggatgccaatgtctcaccatgagccttaggtaatagcccctccagataccagccttgggttggaagcagctgagagcctttctacccggccctgctcctctctggattctaccctgggcatgatccctgagtattgtttgtctgtttgccttgtaggcgtcatccctcaagtgtatcacttagttcaagagtcctggaatcttttcacatccactatgaacacctctcacctcctggccttgctgctcccaaaatctccacaaggtgaaaacagaagcaaacccctgggcaccccatacaacttctctgaacattgccaggattccgtggacgtgatggtcttcatcgtcacttcctacagcattgagactgtcgtgggggtcctgggtaacctctgcctgatgtgtgtgactgtgaggcagaaggagaaagccaacgtgaccaacctgcttatcgccaacctggccttctctgacttcctcatgtgcctcctctgccagccgctgaccgccgtctacaccatcatggactactggatctttggagagaccctctgcaagatgtcggccttcatccagtgcatgtcggtgacggtctccatcctctcgctcgtcctcgtggccctggagaggcatcagctcatcatcaacccaacaggctggaagcccagcatctcacaggcctacctggggattgtgctcatctgggtcattgcctgtgtcctctccctgcccttcctggccaacagcatcctggagaatgtcttccacaagaaccactccaaggctctggagttcctggcggataaggtggtctgtaccgagtcctggccactggctcaccaccgcaccatctacaccaccttcctgctcctcttccagtactgcctcccactgggcttcatcctggtctgttatgcacgcatctaccggcgcctgcagaggcaggggcgcgtgtttcacaagggcacctacagcttgcgagctgggcacatgaagcaggtcaatgtggtgctggtggtgatggtggtggcctttgctgtgctctggctgcctctgcatgtgttcaacagcctggaagactggcaccatgaggccatccccatctgccacgggaacctcatcttcttagtgtgccacttgcttgccatggcctccacctgcgtcaacccattcatctatggctttctcaacaccaacttcaagaaggagatcaaggccctggtgctgacttgccagcagagcgcccccctggaggagtcggagcatctgcccctgtccacagtacatacggaagtctccaaagggtccctgaggctaagtggcaggtccaatcccatttaaccaggtctaggtcttctccctgccatgtcccttgccaggctcttccacttagctaagtgggcacactgcaagctggggtggcaccccagcattcctggctttctggggtccagataggctggcaagagctgtttttgcatccatttgcatcgtgaagactggcattttgatacttcagctgtttgttcctgggagaattctgagcacagattccagaggtcacagtaagccttgcagcttgagctgaaagatgccagagccggagatgtctgctggcagcaggcagggttcattctggtgacacagcaacagatgcctggcctgggaacccagggatttcacctccaccagtgagaccacggggccactgtggggtgagggaaggagcgcttggagtcagagctctagaccttggtcaactcttcacctctgtgagagatggtgtgtggaggtgcttcagaagtaaagaattctaggccgggcgcggtggctcacgcctgtaatcccagcactttgggaggccgaggcgggcggatcacgaggtcaggagatcgagaccatcccggctaaaacggtgaaaccccgtctctactaaaaatacaaaaaattagccgggcgtagtggcgggcgcctgtagtcccagctacttgggaggctgaggcaggagaatggcgtgaacccgggaggcggagcttgcagtgagccgagatcccgccactgcactccagcctgggcgacagagcaagactccgtctcaaaaaaaaaaaaaaaaaaaaaaaaaaaaaaaaaaaaaaagaattctgtggatgcaaagcagtgggattactgttagatcattagcgcatccagctgaagacaatagatgcagtagtcttggcttacagccctctgcagcaggaattccaggactcacttcctactccatcccttttctctatcactgtgtcttccaccttacatggaaatcagcctgcaagttcctctcctcgatgagatggcaagcgccttgcaggtgaaatccataccatcatggggcttgtgtcttacatgccatggacaggccctggcacaaggagagagctccagggaagttttccatggtgggttgatggtaaaggtgccactcactgctgaatgtttggtgctggacaggagtccagcatgggaagggggccagggctcaggctcctgcagccatagtctcctgcctgcccttccttgcctcccaggacctcatttgatacagtagctggactgagactctgtggctctccccactgttgacccactacagaggcctccagaactcaaggctatggctgcagcctccttcactctgtgctctgaccactgagctgacttgccccagataatgtgccacgtatctttcaaagcttcctcagggtattgggcatcccagtggccttaagtaggatcaggggcagggagtcctgggagtctaacttcatggggcactggctgaaaaaagcaggtgtccccttcctccagccatccagggaaaaaggagaaagggctccaatgagtgtgaatatcttaccttgggggttatggcctagtcctctggatgctgaaccaggcccaaggcttcatctatgtgtggaccagacagcctgtccttacagggaaagaaatgtcaagactgctcctgggctgcattggatgggatgtctccgcatggttctgttggctcagactgaccctccagcagagtggacagtggctggcctactatagcctcccagggcagggtattcatgtgctagagccctggaagagcctcatcataagccagcataggttctgcaaagggggtctggcatagggctctcacccctgaccaagaaccggtggaactgacgcccaagacaagtgctctttgagccagcagctcccttcctggagctgtttgtcttatcgcttcttttggtcacatctcccattcagttcctttgttcatttttgtgttggattttgggcagatttcttgagccattctcttggacacagcttgtgcttgtcctgtggtgccatctgctgctggctgctccaggtgaccacctgccagcgaagcccaggctccgggacccatctattttgtgaaaagcccacatgcacaaagcaacccccaaatgccaaaggagccaagagaccaaagaaggaagcagacaaatccagtttgttggtattgagtgatttattgagggaacttttaagcaggcgggtggtctcgggtggccacaagacaggcagatctctgcactgttactctcggacccaaggcttatataccaagggaaaaggatatacatgctccagcaagacagtgaaaggtagtgtgccagagcaggcaagaacgccatgtgcatcatagcccagaatttgcatgataacatcaagcttgctttgatctaaaagcaggagtacatattcttacactcgggacagtaaataaagtaggagtcaggaggcattcatgggactggggctaatcagaagtcaacatgggaaaattagcatccaagatggagtcacttttgtcttcccatcaccccagaaagatgtcattgttcaagcttcccaaagaattgggggcctcaggccccccctggatcccacgcaagtgcctggagttgcttctcattattagtctcgatggtgccaagatgctggggacaaagatgatttcaggtgcagacatgcttgaggatggagggccaggctaggcctctggggaaagtgtttggtgctaagaattggggtagtgggtagaagcctcgttgagtgtgttctgtgccccagcatcacctggagcttgtagatattcagagtccttgttgccagcccagctcgattgaatccaaatccatgttttatcaggatcccaggttaattgtgtgcacattaaagtttgagaagctctgctctaagaaacaggttgccctggagcctagagacactgggtaagcacctgtagacacccatcctagttctgggaacgtctctaaaattgttattgctgaaaaggtgcattcagttttggttgtctgtctcatctctggctgcatgtggtcatattttttgtgaggctttttcattcttttgataaatatttgccatgtgcatagtttgcatagatatgttcttagtgaacatggctttttgtattctgctctatttcacttaaaactgtatcatcaacagtttttcatcttgctggatatcttttttttttttttttttttttgagaaggagtttcactcatgctgcccaggctggagtgcaatggcacgatcttggctcactacagcttctgcctcccggattcaagcaattctcctgcctcagtctcctgtgtaactgggattacaggtgcctgccaccacacccagctattttttttttttttttttgtatttttagtagagatggggtttcactatattggccaggctggtctcgaactcctgacctcaggtgatccgctctgctctgacttccaaagtgctgggattacaggcatgagccaccgtgcccggcctagatatcatttttgatggccgcttacaagtgtacaaactgccccagtgaaagccagtacccctcagtatctctagctcctgggggtggtggggggggtgggagggcatctctagccagcaagtggaccctctgccacccattgtgggaggaacccaccttacagaggaggatcatggctggaattggagactcataccacaaagactgactgggaacccttggaagatgcaaaactttatcacgtcctggctgtgagtgctaaaaccttgcctaatgctagcctttcttttttaaagtattgatgtggcctttttttttccattataaaagtaatcatattcattctgaaagatatacaatatatacaaaaataaaattgaaaaaaggaaattatcaggagttccaccactcagacataatcactgtttacattttggggagtcattttaaaagttttcatatgcatagtcatatacatatgtctgttttttaaaaaaatggttgagagcatagtgtgtccacatgggaacttataaatcatatttaaggattgttttatatcttttttgtttaacctgatataaatttttattcacttgtttattcattaaacaaatatgtcagacactatgttagctgcggggatacagtggttgtaatcagacattgtccctgttctatgcaacttagagtccattgatagatatatcctatgtccttaatatcatctgttgtggcattctgagctgtctctagacctgttgcatagagttttatgatgaacgtctatgcaaagaaccttttctatatttggaattatttccttaggagagatttccagaagtggaattaacaaagggcatggacagttttcaaggctcttgacgtgtgctgcaaagttgatttccaaaaaaggtctggaacaatttcagggcactccctgaagagtgcccatttcaccgtaccctggccactgttggtgatttaccattaaccaaaagactttgacctgtatcgcccagactggagggtgtcccagctcctgcctccaggtccagcaaacactgtgggcactgaccattcaaggctagcctgaccctgtccctctgtgaaacctttgggggttccacaaagcctttagggttgcaggaccacataacttatccaaacagggatacttgagcatgaaaggggccaccatgaataatcaccctgggacaacaggcaaaactaccctgggaaatgggaacatgagatcatcctactatagataaatctgatccctttaacatagcttaaattcaaccctctccaccatctggccccaacttaccttttcagtctctttgcatcctgacatatcacacgatccagtcacagtcggcctgcaattaccaaccatgccttgggtgtcactgtctctgtacatctgctcccgccattccctcctcctgcctccagccaccccaccccccgccagtctgcaatgcgccccctcgcccatctgtgtaggtccaaatcccacccttgcttcaaaacacaaattaaatggtaccattcaatactgctttcattcaacaaacatgtactgactgcttacgatgtgtcaggcacatagagtacaagaccgaaaacatcccacctcctgtggaactttgatttgtgtgtgcaactgtgacaactggtcctaaagatgaacacaaaatgatgtgccagagagtctgccctgttatggttttgaatagacacacccaccaccccacaaggttatgagctctttgagggtaaaatccaagaggctcatcctccacccttgcaaaacctctgacacacccttggatagagcaggcacttaagcatttgccaagtgaagaattaatattaaagaagcttacctattcactccgcaagagttttctaataaccagttctgggttctccatgaatctgagatcaaaggggagcctaaatttccacataccttagagaaacacccccaggtcctaccactgtgactctctgtccaccctgatactggaagaaactgaagtcaccggattcactgattgctgcttcttgtgaggttaagtgactcatccaaggtcacacagctagatagtgactgagccactggaggggtcaggaggtgatacaggaaagaatcagaatgcatgagtggataagtcaccaaaggagtcactggagtggaggggcctggaggggaaggtgaccctgagtgctggaatggccagagaagaacaaacaagctaacagccccaaagacctccattgtccccagatcccattcactgtcatctcctgaagaacatcactctcacaccatcagtgttctctgctcctttttgcacaaaactcctccagagacttgtctagcctctttctctctctttttttttttttttttttgttcttttagagacagggtcttgctctgtcacccaggctggaatgcagtggcacgaacatagctcactgcaactcgaactcctgggctcaagtgatcatctcacctcagcctcttgaatagctagcaccacaggtgcataccaccatgtccagctaattaaaaaattaaatcttttttttttctttttttgatagagactgggtctccctatgttgtccaggctggttttccttttttcttccttttttgtagagatgaggtctctctctgttgcccaggctggtcttgaactcctggcctcaagtgatccttctgtctcggcctcccaaagtgctaggattggcatgggatactgtgcctggccccctgtctaatcctgaagcttccacttcctctcctcttaggtgctcaccagtccattcatatagctcttgccatgttgccaaatcctgtggccagttctcagtcttgtctgatatggtcgtcagctgtattgggtagttggtcactcccttctccttgagactcctgcatgtggctttttcagggcataatggtcatggttctccctgcctcattgggctcttcttccccatctcttttcttggactcttgttgccctgattttgggacactggagcatccccaaggagccctggaggtcctctcattcccctggtgagctcacccagttttctggtgctaaatgccacaaatactctaatgttccccagtgtatctccagtctgaacttctccctgacctccagatttgggtgtccaggcatgctttgtgtttcctagacaccagtcagcatctcaagcttggcacattcaaaagcaaactccagatttgtccctgctacctccttcctcagtgtcctccttttcagaaaagggcaagtcctgcttttcatttgcttgggccacagtctttgggatcacctcctattcacacccctcatccaatctatcggtgagttctgtaagctgtgccttcaaaatgttctcagaatgaccacttctcactgcctccaggctctgccttcaggttcaagccaccgtcctccctacggagatcatggcagaggcctcctttctggcctcattcagccagagtgatccactgacactagtcaggtgcctctacaactttgttcaaccctccagtggctttccatcatactcagggcaaatttcacagtcacagtctgcacctgtgtctgcagatcatccgcccctctctggcctcacttcccactacccttcccctcacccactcctcttcagcagtgcttgcttctctgctatcttttgaacaggctaagacctctcccgcctcaggcctttctacttcctactcttgctgcttggaatgccaccccttgatatcaactttctcccttgctcccttcaccttaagtgaacctttattagaagattaatttcctggctgggcatggtggtttgtgcctgtaatcccagcactttgggaggccaaagcaggcagatcacttgagcccaggaatttgagaccagtctagacaacacagtgaaaccccatctctctctacaaaaattacaaaaatcagctgggcatggtggcacaagcctgtattctgagctacttgggaggctgaggtgggaggattgactaagcacagaaggtcaaggctgcagtgagccatgatcacaccgttgcacaccagcctgggcaacagagtgaaagcctgtctcaaaaaacagaagactaattttttaaccatcctgtaaaaatataaccatcctccctctctcttcccttttctgcccagtttctgccacaggacttagcacattggctggttctttgttgagggtctccactccctcattagaacatgaaccccatggaagtaggcactgtagatgttttatttactgtccagctctcagcaagaacaggctgttcacgagaggtgcagaagaaatatccatagtacaagtgaatttccaactgttatagttcatcagtggagagctgcacttcagcctcttatttgtggagagcgggcatctggttttgtagctgtttggtcccaagtttgacagccgttgtctgctgactgaaagggagctgaagcagctccctttgcatcctggtttcctggtttgtaataataaacactggctgccatgtatttagtgccccaaccactgtgccagatgctttatatacattgccttccctcaatcctgagatcagatagatgaagaaactgaagcttatagaggtgaaataattttttccacattttcaataagagccaaagatgaaacccaatcagttgtcttccaaagcctatgacttagactgttgtagcaggaaggacagttggccagatgacctccaagtggccttgaagctcatagctagaaagtatgagctttatgggcaatggagaagcactgaaagcttttaagcagggggatggcatggtcaggttacatggagggagagtagtgtggctggattggcctgcattccccagaaagcagaagctggggcagaggtctatgagcttttcctttattagggagaaagatcccagggaacaagatgaagaatatggggaaggagacagggaaggagggagagtcaatctgaagatgcgctactgagctggcagctgattactcggtatctcttaaaaccatcttaggacagtttgtctggacgaaaaaagaggtaagaactcatccatcggtttccatattcccttggcaaaggttcgtacatggagcattacctccccacactctggggacacacaggaacactgaacatacctggacataaacagagcaggtcctgcagagatgagaaggatgtttggggtgtgaggtgaggcgccatcaggtcgcacctgtgtgaagccagtgagctctctcagagctggtgcctcagtgggtgctggaccaagaggccagtgaggacaagaggatcataagcagagcagaaacagcatccaattcagggtcagaggaggtggtgtgggctgaactgtgtccccccaaactcatatattgaattcctaaccaacggtacctcatcatgtggccttctttggaagcagtgtcattgcaggtataattagttaagatgaggtcatactggaatatagtgggtccctaatccaatcccttggcaaaggttcatacattgagcattgtccgtataagactggtgtccttataagaaggggaaatttggacacagaaacacacacagggaggatgtgttgtgaccatgaaggcagagttcagggtagtccttctacaagccaaggcatgctgaagatggaagtaatccactagaagctgagggacaggcacccaacaggctcctgcacagccttccgaaggaaccaaccctgctgacaccttgaccttgaacttgcagcctccagaactgtgagaccataagtttctgtcgttttagccgctctgcctgtaacgctttgttgtggcaaccccaggaaactaacagaggaggtgagattgggggcagggaggcccatctgtggggggcatcatgtcagtcaggcactcagtaactgggggaaaatcccaaactcaagtgggtgatggcaaaatggggaaattatcggctcatggaatggggctctccaaaggaagttctttgacttcaggcttgattcaagggtttgaacgaggatggtagggctctctagtccttgcccccttgtctccacatgttttgaactgcacgtttgtgtgcctccagaattcctatgttgaaaccctaacccacaatgggatggtatgtggagatggagcctttgagaagtgattagatttagttgaagttatggggattcttcatgacgggattaggcccttaccagaagagaccaaagagcatgctctctctctctctctctctctttctctgtctttctgtctctctctctctctctctctctgccatgtgaagatacatcagggagatgtccatctgcaacccaggaagagagccctcacgaggaaacaagcaggccagtaccccagtctgtaggacttcccagcctccagaacagtgagaaataaatttctgtggtttataagccacccagcttaaggcattttgtcacagcagccagaacagaccaagagaggtgcctgtgtcttgatctctagagagagcattggccaaggccaacccagccatgagagagagacagagagaggcagggctgggctgtggctggctggggtgtggactgatccagagctggcagtgggccagaggaagttcagctccccagggctggatctggtgagaggacatggaggtcagcaaacaagttagggtcctgaggcaccgggtgggggtggggttcagcaaggaggtcttggtggacaggatgtggcagtggcagaggagctagttctccagagctgagaccagagatgataccaggtaagtggcccttcacctgtgctctgtggcctcacttctgtagagaatcgaggccagcttcagggtcaagcttctcggctggaagctgggagttgttgctgtggttcactgagtggcagggatacagtgatgactgagaaaatgctgaagagacctggaagtcccccatagaagaaatctgattcttacagcgctgcggagaggcagtctgggaaggcctttcttcccagagtatctcttcaaggttctgatacacctcacaagccctgcaaatacagacagaccggaatggggctcccaggtccagaggagatattgggaaagggtccgaggagcagagcaagatgtctgcttagccggcagtagccagcactcccggcctgggcagccaaacaggcatctgcaaggggacttgacaatgatcggtggagcaggagggtgcttgagagtgtggctgcttaatcatggccttgaggtttgttgttgtttaaatgtcaccacttatttgaaactaattcctgtcagactgcgaaaagtttatcagtgtaattgggtgccggcaaaaagctctcttaaaatacacatcctttcattcataaagctatcaatggggcatttgattagcatctttttgactgccaaggaaaccatactgaaagcagggcatgcattcagaacaaagaactccagctcgtgggtgaaaactctgcgatagccatatctcccccaccagatagtgtgctttgtgatggctggcagcctgtgccccttggaaatgtcattttcagccccttctgggcttgtgactaaggtgtgggtggtggatctacaaaggatttcccaaaaagaaggcctcctttacataccttttgttctgtggactgacccacttgtcccacccacatacctgcagcaggcgggagagttgtgccttaactgggcagctgtgagcaccagtttttttccccaaattcctgggtgctatctgagcatgctgctatttggcagtggggcctcagtcacatcctgatggagaaaatgtgaaggtttgtcatcagcttatttaacaattcagaggctggagtctattccactttttgtccagtatgtagctttaaaacagttacatataacatggaacagtatgacatgaaaagagagaggtttatagagggagatgggaatcgtgacagcccctgcttacggagtttgcccctccagtcctgaattcttctgcatccccacatcctgcttgtctggaaaacggctgcagcttactacttcgattcttggccttccagaaactggactcctggcccatcttttcatctctttggagaaacaaacaacaaacaataatctcgtcataattaaaattcactgtgatataaagctactctaaaaatagtacaattaaaattaaaatttatttcatttcttgagctgacatttcagacagccaggggcctcccactaaacttgaaggtgatgagtctctgctcagtctcacctcccgggcttctgttccagcatgagtctgagctccattcaactcttcccgggccttttcagctctaggtgtaaaggttcagtgtgaactcgtagaaagaagacaggcttttcagtcaacagatctgaattcttacacgcactgtctcatagtccttggtctcagtttccatgtttgtacagtgaggatcatgggttccaaggatttgggttccaaggtggggttggacaatgaaaccatagctgtccagtgtggtggccatgggccacatgtgacttctgagcacgtgaaatagaactggcacaaattgagatgtgccaagtgtaaattacacattgaatttcaaagacagcccctacaaagaatgtgaagtgtctcattaataattttgtatattgattatatgttgaaatagcaatattttagatatattgggttaaagtatgaaaatcaacatcaatcttttcgttttactctcactattttttagagcagctttatagtcacagtgaaatggagtagaaagaacccaaatgaccactccatctgtcctaagccagtctgagggctttctgtccagccctaacgctgtaccatgatcctcactgtacaaatatggaaactgagaccaaggactatgagacagtccttataagaattcagatctgttgactgaaaagcctgtcttctttctacgagttcacactgaacctttacacctagagctgaaaaggcccaggaagagttgaatggagctcagactcacactggaacagaagtccaggaggtgagactgagcagagactcattaccttcgagtttagtgggaggccactgggctgtctgaaatgtcagctcaagaaatgaaataaattttaattttaattgtactatttttagagtagctttatatcacagtgaattttaattatgacgagattattgtttgttgtttgtttctccaaagagatgaaaagatgggccaggagtccagtttctggaaggccaagaaggacttcccgtatccttcctgggccccaaacatgcacagcctccccgttagctacactgtccactagagtggtgtgtttgttacagttgatgccagactccatggttcggggtttgctcttggtgttgtacattctatggatttggacaaatgcatcatgacacgtaaccaccattatagtatcacacagaatagtttcatggccctaaaaatcctccgtgtcttacctatttatcacctcctttcctgttaaaccctggcaaccaccgatctttttaccatccccgtagttttgccttttccggaaagccatgtagttggaataatactgtaagttgtctttcatattggcttttttcacttaataataagcatttaaagttcctccatttcttttcatggcttgacagctcatttctttttagagctgagtgatattccattgtctggatgtgccaaaatttatttatccactcacctactcgaggacatcttggttgcttccaagttttggcaatgatgaataaagctactgctgtaaacatccatgtgcaggtttttatgtgaacataagctttcaactcctttgggtaaatatcaaggagtacttttgctggattgtatggcaatggtgtgtttagttttgtaagccactgccaaacttcagccgattcctggtttccctattctcggcaggctggcctcacaaagttcgtctcctgcagagctccaaggaagctggttttggctgaatctgaagatgatcaacactggtaggatgctgctgtgtcatagactggaaccccagctcctgatcatgctggagtggggctgctgctccctgcaaccccacctgcctcccccttgagctggaagagaagggctgacggccagagttctgccataccccactacgatcagatcaagctctgatcccaccaggccaggggctgtgcttccttgatcatataagcccaaggtccggggtcgctctcctggagtctgacatcagcccggctaggtcccagtgcgctgctctggaagggtcagaacgcttgttcctgagcttatctctgtggattttccctgatgaactctgatctagcaggcagtgtatgggctgctaagtacttttcccttgtttgctcaaggagtttgcggccccaagatcatttccaaagccttttgcttcagcttgctaaagggaagctgctgtcactctcttcagcttgctaaagggaggcggagttctgaggaaggcaggcaccttaagggatgttgaaagttgcctctgtttgctgtgcctaccacctacttctagtcctcctctcgccgcccagatcatcccctacaatgcattacccatgcctgccccccaccacccagaagctatgggggctctggtccaagccccacacttgtccgaaagaggtgcctgggccccacagaagccttgtcagatgatggcagctctcttctgatagttcaatggatctgccacctacacagagaggtctggaagtcgctaactctctttgagtctcagattccatagtagtcaaatgaagggtttgaaccagaatattttcaagaatttgtgctcttctaagagtccatggtttttttaaaagttaatttaagttttaaaatttattttttattttatttaaacatttttatttattttttaaaatcttttattttaggtttcagggtacatgtgcaggtttgttacataggtaaacttgtgtcatggggatttgttgcacagattatttaatcactcaggtactgagcctagtacccaacagttatttttctgatcctctccctcatcctactctccatactcaagtaggccccagtgtctgtcattcccctctttctgcccatgggctctcatcatttagctcccacttataagtgagaacatgtggtattttgttttctgttcctgtgctaatttgctaaggataatggcctccagctctagcctacactatggaatactatgcagccataaaaaagaacgagatcatgttcctgtaaaggacatgatctcattcttttttatggctgcatagtattccatagtgtatatgtaccacatcttctttatccaatctaccattgatgggcatttaggttgattccatgtctttgctattgtgaatagtgatgcaatgaacatgtgcatgcatgtgtctttatggtagaacgatttatattcctttgcgtatatacccagtagtgggatttctgggttgaatggtagttccgtttttaggtctttgggggaattacctcactgttttccacaatgattgaattaatttacactcccatcaacagtgtataagcattcctttttctctacaaccttaccagcatctgttattttttgagtctatgatttatctttgtgggaaatagagtaattttaaggccctccaacctctccatggaatgaagtagagatctgccagcaaagccagcatcaggaccgagtagaatatccagtacatggcaggtgctgcgtgatttttgttaaaatcataatctcattttaagaggactgtcctacacaggccaagcttgattccatggctcttccagttaatttcctcatctaagttagtattagccatgtccacatctgagctgtgctattaaaagccagaccagcagcctcattgctcccatcgacaggcatatggtactagataaaaagccataaatgtccaaactgttgagaaaaaatgtgagatgagttgagggggacacaggttgccagcctgccactctgggccccgtgctggcctgggtgcagccctgtgtcctgtgttgctgacctgtctcccagtgtcaggcttgggcctccctaggaaaattttccatggggctctgggcctcctcctccctcctgccttgcctgaactggccccacactcaggactggggagtgtcaaagtgtctgagcctgggggaaggaacaaatgcaaagcacgtgaggattcctcctctggggagagtttatcccataagtaatgacatcacggttccccagccttccaggatggcatcctcaaggtcatcttcatcctctcttcctctacaggctctgccactgcagctacaaactgcagcgaaggcccccattaggaaaaatactccccacgactttgccagcccctgttctggaccttcttcccctcagagccaagccccacaagagtgttctacactcctggccaccacactctcactttctctttgcttctcagctgacaggcattttcacttctgtgactgctgaagctgctctgcataaaagcccatctctactaaagataaaaaattagctgaatgtgatggtggacaactgtaatcccagctacttgagaggctgaggcaggagaatcacttgaacccaggaggcggaggttgcagtgagccgagatcgcaccattgcactccagcctgggcactaagagcaaaactctgtctcaaaaaaaaaaaaaaaaaagcacaagtggcatggtcttgccatgcgatttgggtccttgcaatacttgatctttgcagcttcattcttgacatcacctccctgaaatctcctcttcccttagctcccatggcctgactccagctaggtcctctgtccctcatatgccaggctttcctggttctgctgtagcttttgtgtcctgcccccaacaccctccataagcaattgcaactgtgccccgttcccagactcacaccttctccagtctccgtctacctgcaggctggacgcctccacggcgtgttccacacatacctcaagtgcaagtccaaagcaaaatatggtccttctcagattccagctggattttccatcacagttattcctattgtgaaccactgaattgcctagttaggggcatctgattcagacttgttcctttagcttggactatgtcaagaacctccctcaatgacatctctgccaccaggccttttgtccagcgatcctttctctggacaacgtctcacatctgaccttgactctcccactcagcggttcctgccctctgcaggatggggtccccgtgctttcacatggcccctggccattcacagcttccccctggctggccttcctctcctgcttgttccagcaccccctcactcccaccccatgcttgaatccacagactccttatttttgggtcctcacatatgccacactgtgcccagctcaatgccttccgaatctcatgctttccaattccaagtttaccttctctgaaaacttttcctggctcccttgtttcgtgtctgcatccctggattttgcactttgccttgttcctgttgggcacttagggaatcttagagctggaaggatgcaatagagtctccatcttttcacctggctgtaaccccggcaaacaaagggtgtaggttgttatctcctgggcagctggcacagtgcctggcccagaataatgccccctgagagcacagtaaattggtttccaccgtgaagaacagatattggagcttgaaggtgagctagcctccaacaggggaccagggaggtgctaggccagcgagcccaccttccccacgatgcagccaatcaagactccagagggctccagcaacagcatgaaaaaaatagctctccatacaaagcatggaaactagactttagggcctaggggaatggggcttgtctgcctctatgtaagaaagcaggacaggccgggcatggtggctcacacctgtaatcccagcactttgggaggccgaggagggtggatcatgaggtcaggagttcaagacctgcctggccaacatggtgaaacaccgtctctactacaaatacaaaaaattagccaggcgtggtggtgggcgtctgtaatcccagctactcgggaagctgaggcagagaaatgcttgaatttggagggaggaggttgcagtgagccgagatcatgccactgcactccagcttaggcgacagagcgagattccatctcaaaaaaaaaaaaaaagaaaagaaagcaggacagtatattgcaaattaagctcaataaaaagagagaaagagagggagagagagagaaagagggagggaggaagggagggatagtgagaaggaaaggggcagtcaggcagaccatggtcccctgccaattctctgggcaccggtggaagcaagttctgcgtcttgggcacagtactttatcacctgattgtacttcctccacctctccccaggcagaactattgacccagggatctataacatttgtatatatcaacacagaaaccaattaacaaatgcttatattcctgtgcaaatatgcaaacttccttctgcagacaggggtaagcagacacctggcagtatttttagaaatatttaagaaacacagttcaggtaagaagcaggctgctgtaccctcctccgggaggaccagtacctagaaccatctgtttttctttgtcttccctgctctgctctgagcgtggggatggtccttatccttagcttcatctttattaaagctggcattttcggctgggcatggtggctcacgtctgtaatcccagcactttgggaggccaaggtagatggatcacttgaggtcaggagtttgagatcagcctggccaacatggtgaaaccccgtctctgctaaaaatacaaaaattagccaggcgtggtggcatgtgcctcgagtcccagcactcgggaggctgaggcaccaggattgcttgaaccctctgcagtcagccaagattgcgtcacggcactccagcctgggggacagagactctgtctcaaaaaaaggaaaaaaaaacagctggaattttcttcagtgcttacgctgtgccagatacatgcatttactcacttcacaatgagagggaagccactatgtttatcagtgaagcagggtcatttgggaagcattatccaacaccacctactatgggcccagcccatggcaactggaagcagcactactcagaaggaaaggcatgtggagaagctcagagctgacaggggagtctatacttgattgtaagatttctgtacaaaatgcctttctgtgtgctgtatcatgtagtgaaagataagaaacaatagaatgtccagcaatcagagaaggcttgacatgacaggctactttttaacagcactgagaaaagcttgctatctattaaatattttaaaatcaggtgctaagccgcagagtaagcacctcattatttggaaatgcacttatacattcacagaagcaacacccctggaaggaaataccccagtgatcatgggattgtagtaacatttttgtttgtactttttatataccttaaatttaaaattccttatgaataggtgaaaagcctgtccaggaagctttgtagggtcccctgagttcttggtgttctgtcagtggaggctggtttgagtcattcctgtaggagagctacccaaaacaaaacgaaggggaagcaagagatgcaagcttctaagcctctgacaccttttgcaaaattgctttcctgcaaggctgtgctgcttcacctgctcccccaccagctggtgtgagaggcacagggtttggagcagacagctgtgttctgaagggatggcattctgtctggtgacacttagtggcagtccacttttctcccacaggttgctggctgatctagttgccaaggctcctgcgtaggtgttatctccaaacatgcaggcatagttaagagatgagaaatacacgtgtttggacaaaagactggagcacagttcaatcagcctcagcaacattatctctaaaagcaaatgagtcctgctgttgctggggacctacccctctgccttggctggaagtgtttgagtctgtctgaacggtctgttatctccagggcaacataaagtttgcaggaggcctgttcactccaggtgttatcgctgtcgctgagatggtgctaagcctacaggcggcagaaggccaattgctaaggcagagggagcctttagtggggagccaggcagcctggggaccctgggccacagcttccttccctatgacatgcactctcatgcccttcccactcaaacatccagtcattctgcacgtcctggtagagggagatgccaggcgaaccctcggggtaaccccagcacctggaaaaactcctcagtgggtttgctcagtgtcatttaaggatcccaaccttgaaggttttggacttgggatcacacattgtttcattcagagtgttaggataggggtctgtctagttcaggcatctcaagttagagatgagaaaccagactcagaagtctgacggtccttggaggctggccgagagaaagacctgaggctccccgtctccctgcctgggcacctcataccaccttgcttttccctgccccatgtcaagagcaagctggagccgaatttggggctcccagttgggctccaagtgtgatttcctccacacttgatgaccaggaggccatttgtaggaggctgggatgagcaaagtgggtcaaagtgccccctgcctccaaatgctcgcgtggaggttgggcagtcagacaccatgggggagaaaccccaggactttagcagaacaaaagaagggcaccctcccttcctgggccctgccagactcttggcagaaggccagggctactcatggggcggggagtgggggaaggagggaggagcagggatggtctgttccagccctcctgtgttcatcctgagccgagtcactgaggcctgcagcacagctatgacacaacttttggggtgtcctggtaggagggctttgggctgcaggtggggcattggaagcagatttctctctatagtaaggcagtagatccccaggccttgccctctgttcctgaaaatgtgagttgtaccttgaaccacaaaatggctgtggggtgcagcttggtgtgttggaaggagggctttggatgtgggctgcaactgcatcatccttgctcagttctcatgtggcaggtgtgctcctgcctggtctggggcagtctggcaggctgctctgtagccccaagcctggatctgccaaaactggcaaggagtggaggcctccccgtggagcagtgcctgaacctgcagcccctggggcagacactcctggctcctgggcacctcactcaccatggctccccactttcttagttggctcgggccgctattgcagaatgccatacaccacgtggcacgtggacaacataagtttatttcttacagttctggaggctgggaagtccaggatcaagtagctgaaacagatttggtttctggtgagggcctcttactctttcatagatggcgccttcttgctgtgtcctcctatggcagaaggggtgagggatctctccagggtcttttataagggacctaatcacccctgcacaacccagcctcctaatagcatcaccttgaggtttaggatttcagcacatgcactttgggtaaacaccgtcaatctagagcatcctccccccccatcatgctggcttccagactctgctcccaagtgaatgtccacacccaaggggggccctgagtcttccttaagtctctttgtctaggacagactgtgctgaaagggcccatctaatctcctgatatggtttggctgtgtctccatccaaatgtcatcttgaatgatagctcccataattcccacgtgtcgtgggaggggcctggtgggaagtaattgtatcatgggggcaggtctttcccatactgttctcgtgatgctgaataagtctcatgagatctgatgattttataaagagaagttcccctgcacatgctctcttttgcctgccaccatgtaggatgtgactttgctcctcattcaccttccaccatgattgagaggcctctccagccatgtggaactgtgagacgattaaacctttttcttttacccagtcttggatatgtctttattagcagtgtgagaatgagctaatacatctcccaacagcctgggccccacccacccccactcctcaaacctcctcagtctgtccttgtacaggttccttctcctccagccccatctcgcttcatgtgacttctttcttccttaaactctctgcactctctcctgctcccaggattttgtatctgcagtttcctctgcctggaatgtactccacctggtctacaactcccagctagcctggagtggagagcttctatgtcactccctctgggatgctcctgctgacccccaagactggctcaggccctgagttcgaccctcttgtggttcagagaattcctgggcatagccatgccctcacttgtgcttccactgccacatggggttgctggactgttgtccacttcctcaggggcatctgcttcctcagaacagggcctgggcattttgtcacctaggattccagtgccagcacagagagtgggctcagctgcagacactcagcaatgttgactgaatcaggaggcagcaggtgactcgatgttatgggctcacgggaaaacccctctcctcttcagagggccttaccctgaggtggcctcaccccagttgtcttcactgggtatgggtctctttgcccacccgctgctgcctcactaaccttcctggcctcagacaaatctaaactcaagtcaaaaccagggtgaagatgggcctacgtcagctccagagagggacagcctgaattcccctccctctggtcccatttccttgggaggatcagcctcttcctggatgatgacaccagggctcttcaccccctagggaggggtccagcccatgtctgtggctctggtctgggccctgaggggacacacagtaagtggcaaacacagacggaccaggccgagagcaagacaacatcctcaatggttaagatgtataggccagagggaaattgatcaggaaatgaacttagaagtatccagggactgatggggaaggagctgtatttggaggacctgtgatgcaagttacagaatcaaagatgtggcccctggttttgctgtgtcctcctggaatgggtagcaggacaggagccaccatgcagagggtggtcacacactcgggcttgctttaacctgggtctttccttaccaatgcatttctggctacactggggaaaacgaggtggctaacacattttttttaggtgttagaagacctgtgtgcactttctctctttctccctgcactccagccacactggcctttgagtttgtagaatgcctacactctgctctgcctcagggcctttgcatgtactgtgctcactttatggaaagctttgttctcaatctcatccaatctctttaattatttgaatgctatccatccttcaacattcagttcaaatatcatagccagtaaaatctgctgtaataaactctcttagtttcctccaatttttcttcctaatatttatctcagtttgtagtcatgtattcttgcgatggttgggctaatatctgcctcctcactggtgtttaacctctagtaaacactagaggtttaatctctgaggtcacatctctgagggcagagatatgagtgacaggtccagtcttattcccaacatcaaggccagagcctgtcaggcagcaaatgcttagtaagcatttgttgagttgactttgaattgtcagagctagagggtcggtttagcattgacacatgggggacatcatgggagaagccacgttttgttaggacctggccctggggagatttcttaagccaaaggctttgggtctgccacccttccatccaaggagaagtctgaagacagggtcagcattttgtttgtcctccacagttgctaactttttttttattttttgagacagagtctccctttttcacctaggctggagtgcagtggcatgacttcagctcactgcaacctccgcctcccgggttcaggcaattctcctgcctcagccttccgagtagctgagattacaggcatgtgccaccaagcccagctaatttttgtatttttagtagagacagggtttcaccatattggccaggttggtcttgaactcctgaccttgtgatccaccctcctcggcttcccaaagtgctgggataacgggcgtgagccaccgagcctggcccacagttgctaacttttaacacacaggacatttcatgtaaaaattgtgacttgcagcttcttttgaagaatctgaagtcaagcagccctggcctgcatttgtgcatggctacctttgtgggatcttggtcacagctgaccctttgggtgggcatgctactcttcagttagttgggccctcttcactagttttttcactagtttttagcacctgcttgcccctgttagcaggtatggacttttacctgaacactcagattagaaagagatggaaaaaccacatggccttgcagaataagggagatctcatctccatgcaatgaggaatcagtggcaggcctctttgcagaacctccctggaagggaattgctatggttgcatgtgtcccacaaagtttatgtgttggaaacttaatccccaatgcagcagttttgagaggagggagtaatgtacagaaaaatatccagaaatctgtacagttgatatggcttggctctatgtccctacccaaatctcctgttgaattgtggtctttagtgttggaggagaggcctggggggagatgattggatcataggggcagatttcccccttgctgttcttgtgatagtgagtgagttctcatgagattatcactccccctcctgctccaccatgtgaaggatgtgtttgctttctcttccccttcttccatgattttaagttttctgaggcttccccaaccatgcttcctgtacagcctgtggaactgtgagtcaactaaacctctttaactcataaattacccagtctcaggtcattctttatagcagtgtgagaacagattaatacaacagggttccccatggatctgttataaaaattaggttgtggatgtctatcataaaactccaggaggctgggcaaagggtgattggaaagcagtgagcaggcactttcagagctcatgtgggacatggggggactcctgcattcctaccagccagagtggagcgtccttgtagaaaatctggtgcgttcagttgacatcccagaaaagtcatgtcttggcaggaggagtaaagaagccctaaataaagtctaatctaacccctttccttcagtcaaagcttcaaaacaaacctcaaaagggtcagggtaatttctaagtaactcagctggctgccagaaaaatatctaccaatctttagaggaggacaacaaaatctagcattaagtaaggtataattaacaatgttcggtgtcatataagaaatacagacatgtaaaaatgcacagaagtgcaactcctaccaagagaaaaaccagtcaatagaaacacactcaggaatgatggatgttggaaatagcacacaaaggattgaaaacaccaattacagatatacacacgaatttaaaggaaacatgaaagtaatcatcaaagaaggagaaaaattaaaaaggaaatacaagggccaaaaataaaaatcttaaataaaaaaatttctttatgaaatgaacagattagacgtgaagaagaaaagatcagtgaacttgaaagttgcaatagaaactttcaaaactaaaattcagtcaaaagagactaaaaagaaaatttaaatgaatctttagtaacctgtgggaaaatattcatgcaagtatatggatcacatacttgtaattggaagctgagaaggaaaggaaagagggaagagaaaaaatatttgaataatggtaaaaaatgctccaaatttgatgaaacatacaaaaccacccatccatgatgctcaatagatcaaaagcaagataagcacaaagaaaactatgcaaggtaaaacataatccaattgctaaatgccagtggctaagaaatgtgggtgggcttcatcaaatctattgaagatctgaatagaacagacagactgactctcctgcaagtaagagagaatttcatcctgcctgactgctttgagctgggaggtggttttttttttttcctgccatttttgaactgaagtatcagctttttatgagtcttgagcctgccagcctttgaactggaagtacaccattggctctgctgtttccagcttactaactgcagattttgggacttgtcagcctcaataatcataggagccaattccttacacacacacacacacacacacacacacgttatgcatatgtacaaaattatatatagttatatattatatttaagtataatcatatctatctattccaaaattgggtctctaatctgattacattttaagttgctaataactttatttccaactgtaaagagagcactaatagtccatggcatgatctaacaataaagatatcaccactggatactcctaatcaaccccttataagagacaaggagctgggtaactgtgtatactttcaattattttcctcacactaacaaatataataagactcaccaggtgtttctaatgtgaagtgatactaagtggacaaaggatgaaaaacacttaatggtaagtatgtgggtaaatacaaaggcttttctcatttttaaatttccttaaaagataattgattgtttaaacaaaaataataacaacgtactgtgtggcttataacctattaaagcaaaatatgtaatgatagcatgatggacagaatggaggaaatggaagtatatggttgtaaggtcttacattgtacataaagtgttataatagtatatttgtaatgagctaatgatacatattgtataccctcatgcaaccactaaacatgaagccagagttatagctaatgaactcacagtggagataaaatagaaccataaacatttttaattcctctaaaagaaatcaagaaaagagaaataaaggatgaagaacagatgaaataaacagagaacaaatgacaaatggtagatttatacccaactatactgataattatataaaatgaaactggtctaaaaattccaataaaaagacaaatatttttagactgtataataaggcaagactcaactctatgttgtctgaagacctcaataatttaaaggcacaggtaggtcaaaagtaagaggatggaaaaaaatatactatgtagcaccaattataacaaagttggaggggctagttaaatatcagaaaaagtaaacttcagaacaagaaatatgcagaacaagaaataaacgagaacatttcataatgataaatttatcagaaagagaaaaattgtaaacatatattcacctaataatagaacttcaaaatatgacaaagaaatggacagaaatgaagggggaagtagagaaatctacacttatatttacaaattgtcatacttgtttctcagtaacttatagaacaagtagaaaaaatgaataaaggggaaggacacttgaacaatactactaaccaacttgatttaattgatgcctatagaaccttctacctaaatacagatttttaggtgtagtgttttatatcctaggaatgcaaagtcagtttaatcaacagcgcaataaatcaatcaatgcaattcagcatattcgtagaatccacattgtttccaactgaacacaaaactttcattataatggaccatatctggggcagaaaacaagtttatacatttaagaggaccaaaataatatagaacatgttatctaaattcagtggaactaaaatagaagttaatagcagaaggatatctagaaaatccccaagtatttggaaactgagcaacatacttttaaataatacatggatcaaagagaaaatcacaaaagatattttaaaataatttttcctaaataagaattagaacacagactatcaaaatttttgtaatgattagagacaaatttataactttaaatgatttttattagaaaatataaaaagtccaaggtcaatgatttaagctttacttttagaagttggaaaaagaggagccaattaaacctaatgtaagtagaagaaaggaaatcaagttaatagcagaaaacaatgtaatagaaaacggaataataaagaaagtcaataagataaaaagttctttgaaaagatcaataaaattgataaactcctaataaaaagtcataaaacaaactaccaacatcactaataaaagagggaataaaaattacagactatgtagagattaaagaaataatatggggatattatagaagctttacggcaacaaatttgacaacccagaggaaatgggaaaatttttcaaaagaaaaattactaaagcccagtgaagaaaaaatagataacctgaatagctttataaccattaaagaaattaactttgtaattaaaaactttcacacaaggaaaattccaggctccagtgacttctctagtgaattcaatcaaatatttaaggaagtagtagtatcacttttatacaaacttgcagaaagtaaaggaggaggaaagactttctaacttaatttatgggatcagcataatcctgatatcaaactcagagaaaagatactacaagaaaaaaatcttataggccaatgtccacaaggaatatacatgcagctgggcaccatgctcacgcctgtaatcccagcactttgagaggctgaggtgggtggatcacttgaggccaggagttcaagaccagcctgggcaacatggtgaaaccccatctctactaaaaatacaaaaaattagctgggtgtggtggtgtacgcatgtaatccccgctattcaggaagctgaggcaggagaatcacttgaacctgggaagtggaggttgcagtgagctgagatcgtaccactgtactccaggctgggagacagagcaagactctgtctccaaaaaaaaaaaaaaaaaaggaatatacatgcaaacatccttaaaatatttcagtatgttgaatctaggaatatatgtagagggtaatacactatgaccaagagtgcttatcctagaaatgcaaagttaatcagtgcaattgaccaatcaatgaatgcaattctagcagtttaaagcagaaaacccaggtgatgatctagatagatgttataaaagcatttgacaatatgcaatactcattcacgatgtactttttttaaaaaaaataaaatcctcttaaaacactggagtagaagggaaactcatcaacctgaaaaaatgctgtcatgaaaaacctacaggtattatcaaatttgatagtgaaagtcataacgttttcctcctcaggttgggagtgaggcaggaatgtccacttttgccatgatcattcaacactgtaccaaaagtcctaggtggtgcaataatgtaagaggaaataccgacataagattcgaaaggaggaggtaaaactgaatccattcatagaagaaataataatgtacttgaaaatcctaaggaatttacaaaaagttactaaaataagcgaatttagcaaggtcataagatacaatggtcaataaacaaaagatcagttgttttcctaaattgtggcaatttggaagattaaattatataaataatactgtctatagtaccatttgaaaatacttacaagatgagcaaaatctctatgtaaaaaactatgaaacattgtggagacaaagtgaattgccaatattgttaagaagtcagctctcctgatttttggttgaaattgacaaagcgattccaaaatctacatggaagtacaaataatctagaataatcaaagcaatttttacaaagaatgaatgttgaggacttatctactttatttcaacattacaggaaagccagtaatgaagacatgtggtataggtttcagtttagacaattcatcagtggaacagaatcagatgtcctgtttctggacatacataatatgttgattcctaacaaagttaccaaagtaatttgatggggaaaaagatagtctttgaataaatggtgctaaaacaagtgaagatctatacatgaaaaaagtgaacttcaacccttacctataccataacttgaaatgtatcacagacaaaaataaaagctaaatttgtaaagcttctagagaaaaacataagagaaaatcttcacaacttgggcaggcaaagatttctcagggcacataaaatttttgaggaaaaaaattgataaatgggccttattgaaattaaaagtttttggtctacaaaagacaccatgaagaaaatgaaagggcaagttgcagaccaggagaaaatatacacaggtatttggcaaagtaatggtatgcaaaaattaaaaagaaccctggaagattagtaagaagaagacaaaacaactttatcaaaatgggcagaaaattttgagcaaacacttcccgaaacaaccaataaacacataaaaagatgcactgcagcattacacatcagggaaatgtgacgacccctcacaccatgaggatgcctgaacttaaagatcgacaattctgaatttttgtaagaatcaggagcaactggaactcttgtacaatgttagtggaaattcaggattaatgctgtcacttcgaaaaacagtttggaagtttcttatgaatttaaatatatacttaccatacaaaccagaaatttccacatcaagttaaaaagctgcacagcaaaggaaatgacaaagtgaagagacagcctacagaatgggagaaaatatttgcaaactacccatctgatcaataaccagaatctatgcaaagctcaaacaactaaataggaagaaatctaataatataattaaaaatgggtaaaatatctgaatagacgcttctcaaaagaggtcatacaaatgaaacataggcatatgaaaaggtgctcaacatcattgactgtcagagatatgcaaatcaaaactacaatgggatctcatgtcaacccggttaaagtggcttttatccaagaaaggcaataacaaatgttggtgaggatgtggagaaaagtgaacccttatacactgttggtgggaatgtaaattaatacagccactaggatgaacaatatggaggttccccaaacaactgaaaatagaactaccctatgatccagcaatcctactggtaggtaaatacccaaaagaaaggaaattagtatatcaaagagatagctgcacttccatgtttattgcaacactattcacaatagccaagatttgaaatcactctaattgttcaccaatagacaaatggataaagaaactgtggtacatatatacgatggagtacgattcagccataaaaaagaataagatcctgtcatttacaacaacatggatggaattagaggacataatgttaaatgaaataaaaaaggcacagaaacacaaattttgcatgttcttactcatttgtgggagctaaaaattaaaaatattgaactcatggagatagagagtggaatgatggtcaccagagctgggaaaaggttgtgggtgtggggggtgggaaatggagatggttaatgggtacaaaagtagagttaaatacaatgaataagatgcagtatttgatagcacaacaggttggccagtcaacgataatttttagtatatttaaaaataagtaaacgtgtataattggaatttttgtatcacaaagaaatgataaatgcttgaggtgatggataccttgtttaccctgatgtgattattacgcattgcatgcctgtatcaaaacacctcatgtactccataaatatatacacctactatgtgcccataaaaataaaaaaaaaaacagaaattcctctcctaggtatttatttattcaagaggaataaaaacacctgtgttcacaaggacttataaacaaatatttataacaattttagtagcctcaaactggggaaaaaccccagacagtagaatggataagcaaattgtgatattgctgcagaatggaacactacccaacattaaagcaggagagattacagatacacatgacaaggagaatggagctcagaaacattatgatgagtgaaaggagcccacacaagagactacagtcatggtggtatagtttggctgtgtccccacccaaatctcatcttgaattcccgtgtgttgtgggagggacccagtggagggtaatggaatcatgggggcagatctttactgtgctgttctcatgatagtgaataaacctcatgagatgtgatggtattataagggggagttcccttgcacaagctctctctttgcctgctgctaaccatgtaagacgcgacttgctcctccttgcctcccgccgtgattgtgaggcctccccagccacctggaactgtaagtccattaaatctttttttttttttgtaaattgcccagtcttgggtatgtctctatcagcagcttgaaaatggattaatacacaacgatgctcaatgacagtgatgcgttctcagaaacacatcattaggggattttgtcattgtgtgaacatcatagagtgtacttacacaaacctaaatggtacagcccattacatacctgggctctatggcatagcctgttgctcctaggctaccaatctgtgcagcatgtgactgtactgaatactgcaggcaactgtaacacggtaatatttgtatatccaaacatagctaaacataggaagggtagagtgaaaatacagcatagaagacaaaaagtagtgcacctctgtggggcatctaccatgaatgaagcttgcaggtctggaaattgctctggatgagctagtgagtgagtggtgagtgaatgtgaagtcccaggacatcattgtacactattacagattttataaacactataaacttaggctacactaaatgtattttaaatttttttcttccttcaataataaatgaaccttagcttctttatgttatcaactttatttttttaactttttgacttttttatattaatacttagcttaagacacatgttgtataactgtacaaaaatattttctttctttatatccttatcctataagcttttttctttttttacattttaaattagaaaaaaattaaaatgaagacacacacattagcccacacctacccagggtcaggattatcaatatcactgcgttccacccccacatcttgtcctaccagatggtcttctggggccgtcatgcacatggagctgtcatctcctgtgatgagagtgccttgttctggaatccctcctgaagaacctgcctgaggatgtgttacattaactttttctttttaataagtagaaggagtgcattgtaaaataatcatgaaagtatagtatagtaaatacataaactgctaacagtcgtttgttatcattgtcaagtactatgcactgtacataattctatgtgctagattttatacaactggcagtgcaggtttgtttacaccagcatcaccacaaacacctaaataatacattgcactaggttgttgccaggcgataagattctttcagctccattataatttaatgggatcaccgtctgtagttgactgaagtgtcacacagcatgtgactgtatgcatattcacctcctagaacccagactcatacgaagaagtagggaataccctactcgcaaccatgttttatttcctagtttcttccattggccattttctttttcaggctggagacttccctcccatccccactggcgttcccagtctctctgcctcctaagtcttcctctgttgctctctggggaccagcttgtgcagcagttttgtatcactgtagggtagggcttcaatgagccctgtcctgtgtccttccctggctcactgcgtcttgccttcccttcctcgcacagcccagggcctgacaccacctcctgcagttggtcattcaggagcagggcactcagggaaggagacggctctgcttcgagtatagcctgggcaccatccacaaacgccttggtgtttgaactcacctgtgcatcccagatacaggtatagtctctccaaaacaaagggtgtaggaaatatttttacttctccatctttccaaagtatccttcccttagtatctcagcaaccttccccggagaggctctttgggctgtggatgtagtacccagtatcctgggctgcagattcattgattttccatgctttgattgggtataatcatgctcagagctgagcaaggttggcagtgagtgggtcactgacatcagcttattcatgatctctctgtgctccgattctgacatgaacttccttttctgtctcagaggagagagatttcagggctgtgagcctgaggatggaccaacacgcacgtcagttgtgtctctgaggactaaagatggccaggacccaggaccccagctagcctccagatgctgctggctgctggggacccgtgacctaaggcacacccctcaacacattttctttcattcctgtcaatctcctgtactggtgactgggctgggacctcctgctggcctccagggccccacctgagcctctggtcccggcctcagtcaggcccaggcctaggggaccggcttcttgtttcctttcccgagagctctctgggagtccttacaatagattccaacccaggcacttttgacagtgaaagaagatttgtattattttcttagggctgccgtaacaaattgccacaaacttcacggtttaaaagaacagaaatttattatctcacggttctggaagtcagaagtccgaaatcacagtgtcacagggctgtgctccctacttaggctccaggcaaggttcttctttgctttcctgcttccagtagctccaagcttggctcgtggctctgatctctgcctccagcctcccatagccttctcctctgtgtgtgtctctccttttctgtctcttacaaggactgagtactcaaacttatatctaacaaagtactggtatcaaaaatataaaaattactcctgcaattcaataataagaagacaaacaacttaattaaaaatggcaaagtcaggatgaacttacctgaagatccttaatttaattacatctacaaagctgttttatccaaataaggttatagtcacaggatccaggagtttggacccagaccaaccttttgtgggggccacaattcaacccactccaggattttaataataactattccataacaaaagacagaacaccatgactgtccctccattcacctgcatggcctctgaaacctaaggacaccttagaagtggcatctctagctcggcgtggtggttcatgcctgtaatcccaacactttgggaagccgaggccggcagagcacttgaaatcaggagtttgagacaagcctgggcaacatggcaaaaccccgtctccactaaaaatacaaaaattagccagatgaggtggtgcacgcctgtaatcccagctatgtgggaggctgaggcaggaaaatcatttaaacctgggaggtggaggttgcagtcagccgagatcgagccactgcactccagcctggaagatacagtgaggttctgtctcaaaaaaaaaaagtgtcatctccaccactggctccctgggccacagacaggcagggaggaaaaggactcagatccctcgtgtgccttccaccgacggcttcgcctcctcctctaacaggtctgtggtctgatgttgagtccatgtggcccccagtctatgccggaggtactccccggctaaccctagaagccagttgtattagtcctttttcatgctgctatgaagaaacacccaagactgggtaatttctaaagaaaagaggtttaatagactcacagttcttcacagggcagcaggagagagaatgagtgttagcaggagaaatgctgggcacttataaagccatcagatctcacgagactcactcactatcatgagaacagcatgggggaaaccgcccccattatccaattaccttcatctatctagtcctaactttaacacgtaaggattatggggatcgtaattcaagatgaggttttgggtggggacacagccaaatcatatcaacgatgttatcctgtcagaactcaagagaagggtgagggctgggggagggccgggggatgatcccatctgaagtggccagtggaagcagttggccttctggagagggaggcaggaaaggctaggaggtaggtggccttggaggcccagagggtagggggagaacgtgggggtggagtgacagctggacatcccgaggtagggactggaaaaggaggcctagggagttccagatgtacccacctttctctttgtaacttaatgctggttgcatgacctgtaggtaacgttgcaggggacttggggtacagtatgagctctgtggttccctgctttgagaaaaggaatcctctttacaaactttctatgtgattgtggtgggggtaataataaagagagccccccactgcccaccacaagggcagtcagaggacccacattggccagagtgtgtcacacattggacgtgcttattaggttgggatcagcacgtggacagcagggccaactagggtccattgttaggaaactgagtgctgggagagcagttgtctctccttcggcatgtgctctaaggagtctgagcttggacctgctgagcaccatagctgtctcctggggagactgtgtctgaagctggagcccaacagagccctgcagaggccagagacggggagggaaagttcaggaccttgcttggactcctggatccaacctcacttcaaagtcatggtcacggatttcccagttagagagctcaccttgagaggtggggtctctgtcccatcccctggaatctaggtgagctctatgacttctctgacccatagagtgaggcacatggtgctgtgcccgcttctaagctcagggctaagaggctgtcagcttccacttcctgcctttctgatccagatgccatgctgtgagaaggcccaagccacatggaggagctgtgcctaggcctgcagaccacagccctcactcggttcccagctgccagctatgtgaggaagccacttgggatgtccagccctgtcgggcctttggatgactcagacgccatctgactaacccagggagagaccccacacaacacctgcctggcttagccaagccaactccttcaactgtgaaagatggtgacaaattattgttttaagccactaggttttgaggttattatgcattatttgaaaataattaaaattatttcaaaaactgtttattgtgactgatatggatgcctaaggtccttgcataaatgtgtcctcacttgatttagatgccaaaataggaatctgcaccttgaatctcatcatgagctccatgaagctttgggtagcctcaagaattctagagtgcaggggcttaaattcaaataactctggcagaacactgatggcctccctcctctggctgtatcatgcacagcctgcttcagctaaggggacagaaggagggagccagcatttctctgagaaccaattataaacaccttgggggaactctcatgatcagtaagatgctttctgagcatcgctttatgcatatgctaagaagctggggcaagagtagctttttttttaatagtacattttatgtaaatttttactgaagtgaacagacatatacaaaaatacacaaattataattatatggttcgattaatctttgccaagggaaccatgtcaccagcactcagattcaataattgaacattgtaagcacccaagaaactgacttgcaccctgtgttgatcatgcccccccaacagtgatagtcacctcattctccagaggccttaggcattgcctcaggatcatggtggaagcttctctgggtggggctgcttggggaccagccatcctgcagtgggcccatgataagcacctgtggcgccacacccctggctagcaggcctgctgggaacacctgtaggaagaccttggcaggatcattggcccttgagtcagctgcttgctcaacttcatgatcagagataaaggtgaatgcaagtactgtggccatgccatgcttaggactcgagaatggtgcagcctctctgtaggccagggaaggaccactaatatggctcccagccaagggcctcagggattctgaatggcacagtctctgcagaacttgcactgtgtggcttcaggtcttccaggacagctaaaatgtgtgggccttgagggtgcctttgggtgctcatagcctcattagggagatgaagaggtgagcagatgtcacatatgccaagacagtggaagcattaagaaaggggaaaggatggggaggatatcaccccaaaggtatgggaaaggacctggtatgtctggaaagtgaagaaggccagtgtggctggaacaaaaggcacctggccagagagctgggagatgagggcagacaaggaggaaggggctttccaggcaaggctgaagcctggatttacccagaaggcaatgaagagccaccagacactttaggggggccatggtgttgtaaaatgaagcatttgggctttgtcccaggttcctggaagggagcttggcattttcagggtggcaggagtgtctttgctattcatcgtgggtccctggggccacaccggagtttatgctgaccaggtgcttcaaggtgggactccatagcttcaggatgcaggctggccaaccatggcaagaccagccatgtgaataaagggtcaggactttgagccacatgatatcagcctgacctctggggagagagtgggtattggaattgagtacaaaggtgtaagcaatgatttcatcaatcatgcctaggtaacaaaccccaataaaaactctggacattgtagctcagtgcagccaccctggttggtaatcgtataaccatgttctgggaggcttcacatttgggaatctccccaaacctctccctgtgcatcttttcatttagcttgtcctgatttgtaccaatcaataaaactggaattgtaagtgcagaggttggtgagtcattctaatgaattatttattcaacttgaagccctgagtgggagcctctatcttggtagccagtgattggaagtgtgggtgcactgggaatgcagctggcatcctgcagggccctaagtctgtggcatctgtgctaacatcaggtggttactgtcaagactttcttcactcagtcaggtctgtgcttcaggtgcactgctctgtggagtggggagggggcctggagtgcatttctgctcatggggctcatgatttgaactcaggcctaatatgttaatgagcagacacctggccaagccctgggggcctcaaaaaaccaagacaggggaagcatcaagaatgtgatgagagagtacgcggccatgggagtgtcacctttgccttctcttctccctgtggctggaaaggctggcctgtctggctgcccaaggatagacggggagaggtttaattgaatcacctactgtgttgggtaaagtaaactgtcgtcattgcaaatataatcaggactgtattttaacagtagaaaatgtgattataatgacatatttatcagctcctttcacctgggtggatctgaggacatttcagaaaacaagtgattggaattgcttggcctacctcacacacttacacacacacactctcacacactcacagagacacacacttataagcacacacagtcctgtgcatgcacacaagtgtatacacacccacgcacatttccacatgcatgtgtgtgcacactcacatacacaaacacacagagacacacccttacagggcatctggtgctctggcctgctctgacacgcagcccctcctgggagtgggcagtaagcattggggggacatgtaggtagtccctggggaagctggaaggctgaccacctggcgagcagcagggcacactcactggagcccctgcctggatgagctggctttgctcagctccagctgtggttccctctgtagactgtgggatcagaaagccctcatcacatgatgtaactctcacaaggctgcaatctacttccctgtccaggtcccagaggctccaggctctttgtggagtcacctgcttgggcagccacggttctgtggagctgcttgtcagagagtgcgcaggctctggagtcagtcagacctgggtttgactgctgactccatctcttacctgctgtgtggccatgagcaaatgcctgttctcactgggactcagtttcctcatctacaaagtgaaacgtgttcatacttcccttatggtcagtgaggatggaatgggataacattctgcaccccgcctggccccacaggcatatgaggtattcgataagtgaatgattgtgccagacaagaaagctgcctgccctcctcctcctcggccctgtgcagggactggggtggatgagaaagcccgtgtttcctgaacacctgtttgcaccaggcacctatttggctgctgcctggatgtccttctcaggttccagctcaggtctcttggaccagtcccctggtctggggtagggatgcctggaacggctctagcggcaaggtcatatctcgccaggctgccaggatgagctgagcattgtgtccacggtgggtgtctgaaggaaataatgtatacagtggtccatttccaagaccaagtgccttgaatcggcttaggtcagcaaactatagaagcaacaggacatactaggcccctgcttggatagctgctgcctgcttgtcggcctcccccttcttccctcttccccacccccttagttgccctcacccgaaccaaagaagtttagataaaagtttattagtctgcaagatagcttgatttgtctcttcttgtcagcctgcctagctacttaggtcataagtcaaacacttgaagagcccctgagctgactaggattgcaatgcattgtgagctgcaacaaaatgcagcaagacaaccctaaaaaaaaacacctaaagcccctacctaacaatcaataggcaacatccgggaaaattgtgaccccatagtactcagtctatgagcaactgggggagggacccgtactctagggataaactgcttgtcgaaactgctgggtgtgcttgtccatcagacacctgatcttgcaagttcatcattaaaagtttcactttcgctgttctctgggtatctgagtccattctttgggtttggacgggtaagtttgtttctcacatgtacaagccagaggtccatgagtgagaatcgggggccaaggagctttgtccatggggccgtaatgggatgagagggcagaggttatcaaactctgagggctggaggaagacatggtttctacctcttatctcatttcctactcatttagccttcggaggcaggcactgccgctatcccaccgaggaggagtctgacactgtgggtggtgaaggccacagttacccggtgagtagctgggctggactccacccttgctccctcctacaatcaacctcctgctcctcccaacaactttcctgaaaggaggcagtgaccactgtgcccttgcagcctccccggcaaccgacttctgaatcatcccactgcagagatctcattactgcagtgagtgtggctccagcctcccctcccttggctgctaatgagcgccctaatttgattgcctccaaatgagtgtgatgcaaaattaaaagatgccagaagacatgaccataaatccagtgagttggcttcaatttattatgtttgaattcaattagatttctcctccgatgttttccgaatatttatctagctgctggctacagaacgataactggaaggggctattactgtttaattccagcctcctccattcagcttgggctctggcaataccgttggatggaaaatctcagcctggatgtggggaggtcaagggagttcaaggtcagctgctgagccttctgccagccagccagcatatttcctgttggggaagggattcaaagcaatataccctattaaaatgttttaaaaatgatttttagtgcataaacactacaagggactccacagaagggagtgttggtgtcaaggcctttgttgtgtcacaggcagcaggggggatggggatctggggtctgggctcagcctggccacgaactttgtgtgacttgggaaaatcactaaccttttccagccttggcttctccatttgcaaaacgacggagttggactctgggaactgttttcagtggccctggattctgcactgctactctccttttagtttcagggtgtttgcccactctccttccccacccccacagccatgtgtcctgcttgaccctgggaacctgacttctttaagctgcctctcaggctttcttactgactgggcagaggttggaattagccagtgggagactctagctggaaggcaaaagtataggaagagagagagtggtcagtgtatccccccaccccgtccccactgcccctccccaaggctgtgtctctccaagacatcagctcctgctggaaaccccttctccacatctctagctcttactggctgtggcaacactattcctctctgtctagccccatgagtaacagcatcctagagttgtttgttttcgtgcttctcaacatccctgttcatcctcttcacctggccacacttctgtaaggactactgccattaaagtctcatcatttgaagcattcaatgccatttcttgccatgaccctgaacaatgcagatactaaatccatttttcgactgtggttttccatggagggctccccaggtctagaggggagctgagacaaaagcattcccggcttgggagcctgttgtgcagttggggaggtcccagagcaccaaggccaagctggggagacgttgtccctatgggcatggccaggcctccggcctcagggaggagagggagacggtgatcatggaggggaggccctgggagtgagaagctgggggaattgttccaccctgcccctccccccaacctccagagagcgaaagacgatgggatgtgggaggacggcaaaggggaagaggaagaggctccctgtcctgctgggtccttagccaagttggaagtgggagagtgagaagcccccatctagggtaaaggagtatgcccccaggggaggagagaaaggctgatgacacagagggctcatttgctctgaaatgggcctcccagtggaacagtgacgaagaggcagagtcagccgtggcggaagagcaggaaggagaggagtcccagagcaggatggagggagcatcagggagatgggtggatggccagggctggcctatggggcgatgaccaaaggttgcaggggtgggttcaggaatgagaccaatgaagtctcctgatttatggcttccagctttggtgtaagtcaatgacccgaatccctggagaagggtggggaatctgactctgaatatgtggcccaggagccctgcatgaaggagctggggcctgaagagtaactctgcattgagtactaggcttccaaatcagatcctggccagctgctgtctctgatggctcccagtcctcccctcagacccatggctgtaggccagactggcaggggcaagaggcaggagccaagtgggacatgtccagtgtcctggccaaacatacactggacgcagatgagccatatgcctgggaaacagagaaatggggtgaggccaggtcttcttgtgagaatgaatgtgccttactctctcctggagagagggtgatgacaagagttcattcattcattcataattgctttttgatttaagcaggcgagtttgttgtttaacaggctgggaacatctctcttttattgaaacatgtgacatagcaggttaaactcctaaagattcagcacagcagatgagaatcaaggagtttccttcttaaaaagcataacttgcatatgaatgaagatgattccaaattatgttttttccccatgaccctaaaattttatcccaaaaggagttatcatattagatattgatcagatcagcatttcatatcaaagctcaggacatccatctaaatatttaaaaatctttcactctcacagcacatcttgtgatcaatgtaaaacaaacagataggaacaaatcaaatatgagagaagggtttatggtgagagaaaacagtttctatcctctcccctccccagtcctggcctcactctccagaggcaacttcttgtaaacatttccatttttagtacttctggtgggtgcctccacaatgcttagtagcatgtataggcacccttatttttttattcatctggagaaaatttatctacctcctgtgatggaacataagaaatggcctcattatgcacctctgcttcctcccttcatccttccaaagttttatcattttggcataattatttttagttttctgttatttacttttaaaactttaaaccatataattgtactttgattctgcattccatccacctcagggagagtaacggtctggggcggtcaggttgggtctgttcccataccctccccttcttctgaaaggactctcccctccctcccgggggcctgtgcccatgaccagccagtcacagggccaggcatatgtcctgggccctggccactgtgggatacaggcatgctccccaatcttgaccactaggaatcctgcaggactttcactactaaaactgctctcttcaggtcacaacagtaactatcagttcaactacaccaaaggtttctgaagacaatggcttctccacccaagcaggttgtatataaattccaaatagaacttggcatcaccctgaaggaattctaacttcacactgttggggaaatttaccaagatagcttcagagtaaactaactttacacagcacattaaaacaaaagacatttattcagcgtcatgatcagactattacatttagcaatcaacagcatgggtgcaaaaaaaaaacctatattaaaacccttagctggaatgctttacacttcccacagaacagaaactaaaataacctgttatacagttagtcacaaatacagtcctcgagttttttgcccatacacatgagtatttgtctaaaacatgtcttctttgtagcagctaggccctgccaccactgtgcttggctgagttcacaaatctgtcgtaacctgtagattccctgtcatttctctggctctcctctcctgctaagctttgtttcctaattaaaatctgccactgccatagctactgctgctgctggaaccgccaatagccaccttggtttcatggttttgcaaagtataggcctccattgccacaggggccagagcttctgcctccaaaatttcctcccttcatgggtccaaaatttgaagactcattgttgtaattgccaaaatcattgtagcttccaccacctccaaaattgcttccatcattaccaaatccattacagccatccccactgccaccatatccaccaccaccacgactgccaccaaagccaccaagaccactgaagtttcctccaataccaaagttgtcattcccactgaaaccacctccacgaccaccaccaaagtttccagaaccacttcgacctctttggctggatgaagcactagccatctcttgctttgacagggctttcctaacttcacagttgtggtcattcacagtatggtatttctgaatgacaatcttatcgacggagtcatggtcatcaaaagttacaaaggcaaagccccttttctagccactgactcggtcagtcatgatttcagtcaccattaaaagggattacccaagcaaaatcatggaattattggttataaaagtaattgttggcacatcctatgtaacatatctaattgaataatggtaccagattaaattatagatgggaatgaagcttgtgtatcatccattatcatgtgtaatcaataaacaatttaattctcttgaaaaaaataaataaaactgctctcttttgttctgggattacctctaggaaggaaatgtaaagtcagctcttgtagggtgcctccaggcccctgacacgtggaaagatcgtgcaggagaaaaccaacccagaggtcagtggaggtggagaggaagttgtgagagagatcaagctgtggtggtgagaaaggcagctggtcctgctcactgaagcctccattgcttccggactgtcacagttacaccgacctgacaatttcagtattagcattagagaattgtttcagctttccaactaacacagggtgtattgtactccccacctcaggtaagatgagaattagcacgtaggctgcctgtgctagttttctgttgctgctgtaacaaatttccacaaatttatgatttgcttagagcaccacaaatcttagttctggaggccagaagtccagcatgggcctcacggggctaaaatcagtgtcacagggcagctgtgttcccatgaggcggctgtgttcccataaggctccgggtggagactgtttccttgccttttccagcttctagaagctgatggagttccttggccagccactttctccctccattgtcacagcaggtgtggcttcactctgacctcttctgcttctcccttccaccgaagggcccctgtggttacattgggtacacctgggggcttagcctgtctaatattgccacaccctcttgtgaatcttcttttttcttttctaagagatggggtctcgctttgttgcctaggctggagtagggtggtgtgacggtaacaaactgcaggcttcaattcctgtcctcaagcgatcctcctgcctcagcctcccaaagtgctgggattacaggtgggagccacagtgctaggcctctcatgaaccttgtcttccagaaatgtgttggactctcatccattagtaagccatctttctctcttttttaatgcttttcccttatagatttacttcattttaaatttataagcttaaatttcagtgatgatgtcttaggaagaacaggagaggaggaacaaaggaacaaacttctttaatgggaagctgaaaggacccttttaaaagtgtgcagtggagagatcctgggcttggtctctggtaaacctggtgaatggtgggttaacactccctccctcactcggtgttgctgggaggataagacagaacatgtggcgagcaggtgtccaatagctgcctcttgctatgtgcagccagtgccacatccaggctgagtgctgtggggagtgtggctcatcccactggggccacccctggcctcgctcactggagactccagaatcagggctgactgagcagcttgtggcactgaagaatgttctaggaaaggaggtgtgtcctccttggaaggggaagcttcatggtgggtgagctgagggtaaggggtgggtgagggccatttgaagagtcacctcccctacattcttttatcttttggagcctccatccacgccacttcaaacaatgaacacacacatccaagtcagtaagtgcactttgtgtatatctatataagtgatgcgcaattactgtataacagttcactagctgacctgacattattcacatatcgtaggcatgtgactaattgtaggtgtgtaatgaagtgttcacatcttattacatatttaattcctaaggcatttctacagttttatttgagaattttggaactgccagtgtgtttttcatgtttcaaaccttttcacaggccctgaaaaaacccaaaggccttatattctgggaccgtaatggacaaaacagccctgggaagtatgcttgggaggatggcgaaggctgggtttgctgagggaggtgccagctaaggtgctgggcacaccagaggcaagggatctggaccacaactgtcagtttgatgaacacactaatggtggagtgacccccaccaggagtggccagcaagcagggtccaacaggaaagacatctgggaggccagcaggtggaatcctggctctgccaccttcgtgctatgtgatatcagccaagttacttgccctctctgattctcaaatgctcggaggccctttgacctctagagtctatgggacctgagtgaccacagggctctggtttgttggtggctgcctctttatttaactccttttctcaaatacggtctatgggctttgcttaaagtgaggtgtcctgtgcacactcttctccatgactttgaggccgtgagaaggcccgccctgcagaaggactgaggaaactagtgctggagtctcctttcttgtatcagtgaaggaaggggagagaggagataaagtgctcaggttacagaatgtgaggatcgtgccccttttttccaactgaagacattcctaggcattttatctcccctgttgcaacttctaaatcacaaaaaccttatgcatccagtttggctgacatccacctgcaatgggagtgagtgagattgagccactcctcaggtgaatggaaaattaaggccaaccaaggcccaccccatgccccactgtggggtctaaaaggagcaggcactggcctgctttctttttccctaaagaaagctctttggggacccagcagaaacagcagaggtggggatgcgagcttccgcctgcatttgttccagggtgggccagtgaggatttgggaggaatggtgtggaaaggccctgcccaagaaggctggatgctggctggggaatgcccagggtgccagctccctaccctggggaaaggccaggctggcatatgccggagccagggtccaaggtcacagagaggccacacctgggcacccctcccagcaagggaaggtccaagctgggaattacttctctttggaaagtgaggggagtggtacagaaatagtgctattgttgctgttgtcctgtcacttctggcattggaaatggtgttgagcttctacgtgacgggcattggaggtcaaacctgaaacaggtgaggcccatccctttactaggctcacgttctaggtagggaggaggcaggtacctcctccacctaagaaacaacaagagatagagaatgcagtaactgtcctaaagagaaaaaccaggggatggagagagaataatggttgtcaggacgggtcagactttaggatggtaaatgaggagtggtctctgagaagggatgaggcagaggaagtgaggctcagggaagtgaagcacttgcccaaggcagcctgctggtcatggcagagctggcaagctcattccctcctcattatgtcaaccttctgggaccagagtctgggcagggcagaaactactgcaccaggggtgcgtggctccagcagagagagacaaagtgccccatgcaatccagaaactgagccctctgggctcaatcttcaaaggaatgactctcagagttgtgtcccctgccttttcttcaccatggaacttttcccagctccactctggtgggcttggggacaggacctgccctctgcaaagtgatgaccaaggataagtcggattttcaaggagaccttggagaacaccaccctcttattgtgcaaaagaggaaacaggtccagagagggtgagccattttttcagcatcacacagctgacctggagcagagtttcctaaaagctccctcggtgctctttcccctgctgtggctagacccctccacaggaacttaacaggaacccaaaggaacgagtcactcatggcagaatcactaatgtgatggagggcaggagtgagagacggcataatgtcaatgctggcacactcctggcacacgggaagctgtccatgagtggttgcttcccaccacttccatcgcccagtttgggacatgtctgagatccagtgctgagcccagggtctagcatgtcatgggagctcaggagttcctaattgactacatgaatgctaaggtgtgggatgtgctccttcctgctttctcattctcaaagaacactcttatacacctggttgtggggagggtatataggcaatcaacttttgcgtactcacttccattgtaggatcatgcatgcatgtggacgtgcgcacacacacaaacacaaatgcacacacacacacacacctgccttctcaaacttgtgggaccagaaaggatgctgcaaggcctaagataataattgctggtctcttttttcttatgctttagcaggaaaaacacactcttccaagcacacagctgcagaggtcttcctgagcatcatgtagtctttaatcatgttgtggaggacaggatgatctgtgcctcaggaatcagcttagttgataactcaattccatggctgggccccatttgtaagcagtcatggcacatcccatggaaacctataatctaattatggctgctgcatcagtcctcatccttcatgctgtcatccacagctcctcaccacccatcttacttggatgaaggctctctgaggtatgaaggacaaacatctgatccttccacttgaggcctaggctgctttccttattctcacagcagccacaagtattgggatcacagcttgaaaggctcttcttggtccgtgggactgaggcagtcaggacaatttcaggcctttagtgaatggaggcatttcattacttcagatctcacctagtcttggaggtcttgggcatttttagaactcacccagccaggctgccactcagggtgaggctacctggattgtttattggtaacgaatgtttgaatcagagaccgttagaaaaccaaaaatgaagattttaacaatacaaaaagcagaacctaaagaggtttaatcagtaggattggtaccagttctttgtatgtctgatagaatttagctgtgaatccatctagtccagggctttttgttgttgtcgttggtaggttttttattattggtttaatttcagagcttgatattggtctagtcagggtatcagtctcttcctgattcaatcttgggagattgtatgttcccaggaatttatccatttcctctagattttctaatttgtgtgcatagaattactcacagtattttctgaggatcttttgtatttctgcatgtatcagtatgccatactgttcaagcacatggactttgcagttggacattcctgagtacaaattctgcttctggcagagcatttaggtgacttagtctgctgactaagctgcagtatcttcatctgcaaatgaagatgaattgtaatatctttgtcatttctcacagtacttatttggaaattcttttttctttgttaatctagctagtggtctctcagtcttgtttatttttttgaaaatcaacttttggtttcatttatcttttgtatggatttttgcatctcaatttcattaagttcttctttaattttagttatttattttcttctgctagctttggggttggtttgctctttttctctagttcttctaggtgcaaacttagactgttaatttgagattgttttaacttcttggtgaaggcatttaacgttataaactttcctcttaacactgctttggctgtatcccagagactttgttaagttgtatctccattttcattactttcaaagatttttttatttctgccttaattttgattttcacctaggagttaatcaggaaaaagttgtttaatatccatgtatttgtgtagttttgagagatcttcttgatattagtttctatttttatcgcactgtggtccaagagtgtgtttggtataatttcaattttttaaaatttattgagacttgctttatgactcagcatatggttgatctgagaatatgttctgtgtacagataggaagaatgtatattctgtggttgttgggtggagtgaatgtctatgaggcccctgtagataaaataatagctgaaattagaaaaagaggtttaaccagctttactcatttaaaatgcaaatgtgctattagataagggccacatcacttggcatcaggccataagacaagatgtgtgtggattatcctgggattaatactcatttccaaacttctaggactattgagagttgttttttttttctagaaatctctgatggactacatttgttccatagttcagcctcatcatcttatgaactatttagataagggatagaaagtatcttttgaattcatgtcagcaccaatagattggtggtcgctgctttaaaaactgggcctagaaggattctgaattcttaactgggcttagagcgaaagaatgccatgttcaaagaagaaagttatcaatggctgcaggaggggtgaggtggcccatgtgtcacatgacttgctatctttgcactgggcaaccctaacctctgagagggtccttgttgaataagataagtaggtccagccctcaagttgttatcagtatagcagagatggtgagccacgaagtgctgccagatcactgtattgtgttctggtcatggcaggtgcatgtatcagtatgccatactgttcaagcacatggactttgcagttggccattcctgagtacaaattccgcttctgacagagcatttaggtgacttagtctgctgactaagctgcagtatcttcatctgcaaatgaagataatacccacctcacagggtagctggggtcattaaatgatatcagatttcaaagcattagatgctcaccttgtagtaatcattattactataattactgttggtgtggaaacacagacacgcctctaaactgtcctgggtacagagaagtctctacagacaggccctgttttaaattgcaagtgatactcaggcagtcttcagtagacaaaggcagaggccattcagtgcaggggaggacattctgtcccctggttaggaaacctgaactatggaatagaaaaaaacttagactcaatattcagaacaactttcctgaaataaaggaagacttgaattttctgaccgaagggtaaattgatttagagaagtcaatgctgagatgacagatcctaacaaaatgaatgtttgccttcaaagaaaagaatcctaggagtatccagtagaaaaccatctctccaaaaaccaatcaagacaacaacaaaaataaaaacaactaccccaaacaatcacatgaaaactcaaaccaagagaaacacttgcagaatgtcagaataaggacttctgaaaatccttccttaacaacaatgagagcactggcaaaaatgtcaaaattaacattttcagagtcctggaaattaaccaaaggctttcagcaatccaagttagatttattcaagaaacacagctgaatctcagtaagaatagcaaattttgtggtgttttaatttgccttattcgtagtcttcttttccaagctctatgatagacttgaacataaatgttctcagctaggcatggtggctcactcctataatcctagcactttgggaggctgagatgggaggattgcttaagtccatgagtttgagaccagtctggacaacacagagacaacctctgtctttacacacacacacacacacacacacacacacacaattaacattctcacaaccatgacagctgtgaaaaccagcagcctggtagccactggggaggacagaataggtttaaagctctccaaaaatcccatcctcagaaagttgttactatttgatctgtctgacagctccctggaaaagacacattcccagggattgtctttgcttaacatggtttggagcttagtctgtgtgaacagccctatcctgagggaatctgtcaaaaacaatcagcaaaaattgtttgacattgcaactgcctgagatggcagtaccagttggggctaataagaggctgaccaaaacagttacaaggaaaaactggggaatgaggtattcatagaggctttggaaaagctctgacatattcttaagaacctagaaggccatgtgcacgtgcagggttgtacacatgtccaagacagatctaactagagcttaacttttgtttggctttgaggctctgtgcaagcaggaagtaaactctgaggcagagttgtcagctgcttgctgaagcatcgaaggcatggctcaacacaaacaaagcttcccagcaaaggtaggtagatttagttgtgcaaggaatttaaagaaatctctgtccaaaaattaatggacaactaaactgaggaaagacttcggtggctacacatgacaaaaagtatacattaaaacttagtccaggaaattcactaaacagagaaacagcagcatcagcaacaacaacaaacagaagcaacaacaaattgtgaagaggggtgaggtctgatttttggagatgccacattattttatttaaaacattcagtttttaagaaaaaaatatgagaaatacaaagaaacaaaatgtgtgacctattcacagggaaaaagctgccattagaaactttttcttgaggaagcccagacattggacttactatcaaagattttagaacaagtcttaaaaacatgtttaaacaactaaaggaaaacatgtttaaagaatgttaaaaagcatgacaatgatgtcttaccaaatacagcatatcaataaagagatagaaaattatataaaaaagggaaaaaaataaaattctgggttgaaagtgcaactgaaataaaaaattattaaccagaggggcttaacagccaatttgagcaggcagaaaaaagattcagtaagttgaatatgggtcaattgagattatacaatccagggaacagaaagtcaaaagaatgaagaaaaatgaacagagcctcagagagcataccaatatgtatataatgagaatcccaaaagaagaggagataaaggggcagaaagaatatttgaagaaataattgccataaacttcccaaatttgatgaagaacattaatttacatgctcaagaaattcaacgaactacaagtggtataaaaacaaagaaatccatacctagatacatcagagtcaaactatcaaaagccaatgacaaaaagagaatctcgaaagctacaaaagaaaaataactcagcatatacactctagcttcaaattcctcaataagattaacaactgacttcttatcaaaaccattcaggcaagaaggcaatgggataacatattaaaagtattgtaagaaaatgactgtcaaccaagaattctatatctagcaaaggtatctttgaaaaaaaagaagaaatgtccagataaatgaaaaatgagagagttcatcatgagtagatcttccctacaagaaatactaaaaggagtctctcaggctgaaatgaaaggacactagatggtaacttcatccacacaaagaaataaagagcactgcagggtaattacataattaaaaagacagtataatgtatttttaattgtaattctcttcttatcctatctgatttaaaaatagctacataaatgagtaattataaaactgggttgttgggcttataatgtataaagatgtaatttgtacgataatattaacacaaaggaagggggcaggaaatggacctatattgaagcaatctttaaatatattgttgaaattaagttggattgatatggattagattgttttatgataaaatgttataatccccagggcaagaataagaaaataactaaaaatatatggtaaaacaaacaaaagaattaaaatgatatgctagaaaatatcaattgaattcaaaagaagacagtaatgagggaaaagaaaaacaaaaaagatgtaggacatataaaaatagcaaaatggaaggtgtagagcctatcttttcagtaaatcatattaaatgtaaatagagtaaacataccaatcaaaatgcagaggttgtgattttaaaaaatgaatcaactgttatctataagagacatactttacattcaaagacacaaataggttgaaagtaataggatggaaaaagataatccatgaaagtagtaaccaaaggggagctggagtggctagttatactaacagtagaccaaatagactcttaagacaaaaattattacaagagacaaagaaaaacattttataattgtaaaagtttcaatctattaagaagacatggcaattaagaatatatatgcacttaatagcagagatccaaatacatgaagcaaaaactgaagtgagaaatagaaaattcaacaattatagttggagacatcattactccactttcaacaacggatagaacaactaggcagaagatccacaaggatatagaagatctgaaaaaaacagtaaacccactagagctggtagttacccacagaacactccaccaccatcaacagaatagacattctttatatgtgtatatggaatgttctcaagaataaatcttgtcatgagaagaatagtggcccccaaagatatccatgccctaatccctggaaccacgttacattacatgacaaaaggggctttgcagatatgattaagggtataaaccttgagatgcggagattaccctggattgtttgggtgggcccaatcaaaatacatgagttcttaaaagtggagacactttcctaaccatggtagggagatgaaatggaaggaggaggagacaattgaggtgtgagaaaggtttaagtgactactaaactgatggacttgatccaccattgctgcctttgaggatggaggaaggggactattaataagggaatgtgggtagcttctagaagctgggaacagttcagctgacagccagcaaggaagtgggaatctcagtcctacaacttacaggaactgaattctgccaacaactcgaatgaacaagggaactctccgagaatttccacaaaggaatacaaccacacagattcctatttttagcccagtaagacatgtcagacttctgatcttcagaaccacaagataataaatttgtgttaggtgcaaatttgtggtaatttgttatggcagcaatagaaaacacatacatgtatattcatccataaaacaaaatgcagtaaatttaaaataattgaaatcatatagaatatgttctctaacaatagcagagtgaaattcaaaaccaaaaacagaaagaaatttcggacatccacaaatatgtagaaattaaatgacacactccaaaataatcaatgggtcaaagaagaaatcacaatgaaaattagaaaattatttgaaatgaatgaaaataaaatcacaacatatcaaagtgtatgggatgcagtcaaagcaatacttagggagacttttatagctgtaaatgcctatattaaaaagaagaaagatctcgataacccagacttccaccttaagaaagtagaaaaggaagcgcaaactaagcccaaagcaagcagaaagaagaaaataataaagattgtagtggaaataaataaaacagggaatagaaaaaacactaagggaaaaaacaagagtaattgcttcactgaaaagagcaataaaattagtaaacctttagcttgactgagaagaaaaaagttatgtgccctatttcattccctatacattaaattattaaattattaatgtatagggaattaaattattaaattaataatgtttagagaatgaaatagggcacatcactaccacctcatagaaataaaaggattataaaggaatactataaacaattgtaagacagcaaaattttaacttaggtgaaatggaaaaattcctagaaagacaggaactacaaaaactgaatcaagaacaaatagaaaatttcaatagaccttagtaagtaaagggattaaattagtaattaagaaactcaccatgcacaaaaaagctcagtaccaaatggtttcgctgattagttttcccaaacatttaaaaaagattattgttaattcttcacaatcttttccaaaaatagaagaaacaaacttcaactcattctatgatgtcattattctcatgataccaaaacaaaagacattctaagagaacacagcaatatctttcatgaatattaatacaaaaattatcaacaaaatactagcacactaaacctagaaacatataaaaatgattatgtatcacaatcaagtgaaatttatttcaggaatgcaaagttggtttaacataataaaataaatctaattaatacaccacattaataaaatgaaggataaaatccacctaatctcaatagatgcagaaaaaacatttgacaaaatcaatatcctttcatgataaaacactcataaaactagaaatagaggagaatttatgaaatctaataaagaacatctatgaaaaaccacaactgacatcatcccaaagggtgaaagagtggatactttccttctaagaccagtaagaaggaaaggaagtccatgctcaccacttctattcaacattgtattagagatctgagctagggcaattatgcaaataagtatgtaaatttaaaaaatagcatccaaattgaaaagaaagatgtaaactatatttacagatgacataatctaaggaattcacaaaataactattacgactaataaatgagttcagcaagattgcagatacaagaacaatatgaaaaacaattgtatttctacacactagcaatgaataatctgaatataagattaagaacagaattccatttacaatggcatcagacaaaataaaaggcttatgaataaattcaacaaataagtctaagacttgtacgtactgaaaacaataaaacaccactgaaggaaattaaagaagacctaaataaatgaaaaaacatcctatgttcatggatttggaagacttaatattgttaagatgtcaatgtttcccaaattggtctacagattcaatgcaatcttgattgaaagattgtgtgcctttttctcagaagttcacatgcagatgcaagagacccagaatagccaacatgatcttgaaagagagaggactacacttcctgatttaaaaacttaatacaggttgggtgcagtggctcacacctgtaatgccagcactttgggaggctaagttgggaggattgcttgagcccagagtttgagattaacctgggcaacataatgagaccccatctctacaaaaaataaaaaaagattagctgggtgtggtggtgtgtgcctgtagtcccagcaacttgggaggccgaggtgggaggatcacttgagcccaagaggtctatgatgcagtgacctatgatcaaggcactgcactccagcctgggcaacagaacaagaccctatctcaaaaacaaaatgaaacaaaacaacccccccaaaccccaaagaaaaccaaacttactaccaacgtctaggaatcaagatagcccaatactagaaatgtaatagaattgaaaatccaatattaaaccttcacatttatggttaactgatttttgacaaaggtgtcaagacaattcaagaggattaaaaaaaagccttaacaaatgatgctgggccaaccggatttccacatgtgaaggaatgaagctggacacttaccttacatcatgtacaaaacttaactcaaaatggaccaaagttctaaatgtaagagctaaaactataaaaccatagaggcaaatgttcatgaccttggattggtaaaaggattattagatataataccaaaagcagaagtgaccaaacaaaaaaaaataagtggggcattatcaaaattgacagcttttgtgcttcaaaggacaccatcaagaaagtcaaaaagcaacccacagaatgggaagaagtatttgcaaatcatatatatatacatacatatatatatatatatatatatatatatatatataaaatttgataagccacttgtatccagaatatatgaagaactctaacaattcagcaataaaagacaataacctaattaaaacatgggcaaatgatttgaataaatatttgtccaaagaagatatactcatgatcaaaaagcacctgaaaagatgcttgacattattagtcattaggaaagtgcaaatagaaccgcaataagatacaactacacacccattaggatggctttcatagaaaaagacaggcaataagaagtgttggtgaagatgcagagaaattgaaaaccccgttcattgctggtgtgaacataagatggtgctgtcactttggaaaacagtttggtagttcctcaaaaagttgggtgtagtattatcatatgaccaaggaattccactcctagatacatacccaagagaactgaaaacctatatccacacaatatcttgtacaagtgttttcaaagcagcattattcataacacccgaaaagtagaaacaatccaaatgtccgtcaacgaatgggtaaacaactgtggtattcctttccagtggtaagagacagaattgattagggaaatgaggcagattcactaaactccactgaaggatggacctgagccaacagttcacaggaaaatgacacaaaaggcctttaaatatataaaaagcatcatgtttaaagcttcacttgtcatcatgggaagtcaaactaaaacactgaattactatactttgtccaccagatgagtgaggatcaaattttgaagatgtactgtcttagtaagaggtttaggaaattggtattttccttctgtactgatgagaatggggacttcttgacaaaatctatcttaagtacaattccacatgccctttgatctaaacacaatattttaggagtctatcctatgatgatacaaagtaatataagaatgtttattgcaataacttccaataacaagctaccgaaaccagcctaaacaaccaaaaacagattaaatgagtagagattggttaaataaattatggtacattcacaatgaaatcttacactgctgttaaaaagtattaatttttcctaaagatatattaaatacatataattaaaaatagaaagaagactagcattagacaaaagctagagaagtagggaaagtacatatatttttgcgtattcctagagaatttctagaagcatatacaggaaacttaacaatcgtgagagagtttggagaggactttggctgggggttctggagtggtgcagagatttattttcaccacttactcttttgtactacttgattttctagaagcatatgcaagatgaatttctagaagcatatacaagaaacttaataactgtgagagagtttggagaggactttggctggggtctctagagtggtgcagagatttattttcaccatttactcttttgtactacttgatttttatcaagtgcgtgcattacttttttgccttttaggtttttattttatgcatgtttagacttttaaattttcaaataatcatagattgacaagaatttgtgaaggggtcccaatatccttcacccagtttctccactgtttacgttttacattctacaaaacaatatcaaaacaaagaaactgacattagcacaatgtgtgttcttctattacattgtatcacatgtgtagattcctgtaaccaccaagacacaaaactatcccatcatcccaagatctctcctgctacctctttgtagtcacacttccccaccaccgcctctaacgcctgccaaccactaatctgttttcactgtttataattttgcccctggaagaatgttatacaagtgaaatcgtacagtatgtgactttttgagattggtttttttcacttagcctaatgctcttgagatccatccatttagttatttgcatgaataatgtttctttttattgctgaatattggcatagatgtgtcacttagtttaagcattcacttagtgagggacattttggttcttttctagtttctggctatgataggaagacacaggagaaaatcatctggacctaggagttgaggatgagttcataggcatggcacccaagtacgattcattaaagaaagaattgataaattggacttcatcaaaattaaaaactttgcctctgcaaaatattctgttaagatgatgaaaggacaagctatggaggggagaaaatatttgcaaactgcatatctgacaaaggactcacatttacaatgcataaagagctctcaaaactcaacagtaaaaaaaaaaatctgataagaaattgggcaatagacatgaagagacatttcatggccgagtcaaatcagcatgtggaaatatatttaacatcattagcctttggggaaatgcaaattgagatcatgagaaatcactgcacacttatttgagcagttgaaacaaaaatataatgataaaaccaaatgctagcaaggatgcagagaaaccaaatttctcatcccttgcttgtgagaatataacatgatacacacagccactcccaaaaatagattgacagtttctcaaaaaacatgcacttaccatattactcaacaatcacattcctgggcttttatcagagaaattataatttaagtttgcacaaaaagctacacacaaatgctcataactgctctattcgtcatgtttttattggcaggtaatttacatacaaagaaattcaaaaatcttaaatttcacaattcaatgtgttttgtcaaatgcctgcactcctgtccctcccccactgtaagatttacaacactctagcacccccaaaaagttatttcatgcccccttcagctaacctctaccatgccactccatccataaaccccaaagcaactattaaaaaaaaaaaaggcaaaaaacgcaattactttcgcaccaacctaatactagtctgatttttaaatcacagattcattttcatataaatggaatcatacaatgtttattctttcatacctgacttctttcattcaggaacacgattcagagcttctgctgtgcagtagggggcatcagtagttcattttctttttattgtctgctaacattccattgtatggattcaacctagtctgtttattcattcttcttactgatgaagttttttttttctcacggcttaagtccaaggtgtgtctttttcatccagccaggtggccccggcaggtcgctcctcagggacccacatgggtcagggcggtgcagcagtgacccacaggggccagtgcagttgaagtggctttgaaacctgattggagaaacagactgctcagctgttaagaacacacagcgctccagaaaactggtgttcaacacaacgcgtcactccggcttccactgctgctgcggagagtcaggttctccggcaaggccccgcgcgcccgcccccgcgcgcccgcttctctgtccagggaacgcctttctgcggccggaggcggctacgagggggcgctgcgaaagcggatttccaggcacgcctggcgccactaagcggcgctgagacggcgctgcctcctgactgccggttggaggctacaggggctctggggcaagggccgcttttaggagtttgctggtcacgaggggggacgcgacctcgtccaagatctgtctgcaagggacccttcccagccgatgtgaacacagcccggggaaaggggccgtccggggagcacaggcagcccgggaagaggagtaggggctgaaaccaaaggcagcctgggtacccaggttttcccaggggacaagtcccccggttagctgggcacagggaggcatggagagcggcagcaactgcgttgggatggggcggctgccccaggttggggcggtgacccatgttccaccaggccaggcgcagggctgaggtggccgactcctgtttcacaagtgaagacctggttaccccagcagcaaggcattccggagtgggagaattcctgagtcctggggaggaagccgtggttacagggctgtggccctgagcaggagctggctggcccagcagggtgggccaagcacttcagtcaaggctgagcgccaggcaccagggactcaggtctgagagacctgatgtacatcctgctccagagcagatcacagagatgtgcccgcatgaatccccaggctaagcccagaattccgtggaagatgcccatgggccaggaacacgggtagtcaccgcgctagggcatcacacagggccccccttggccaaataccacgagggaacttagacacctgcatggggccatggaagtgcctgcaacctcacactcaggcctagggcttaccgaggtattgcagatatttgtgttctcagagtaggagcttaggaatcagtatcttctcttcactacagggacagagatgcagtggcctaggacacatcacaaatatttaaaacgatgtccttggtcaaggacagaggtagccaaggccagccttctcccaggaaactaacccaggaccccaaagcacagagctgttaggtgggagggaattggtctgtatgtctccctatagtgttgcaacacttcggcgctgggctccctgtcccagactcaccttccatactcaagccagaggcctacgaaagccgggttaagatcttcccctgcctgtccctgtaaagcttccccactgtctctggaaatcgtttgagcttcttagccccacagcatgagcccgctctgactcaggccctgacaagctctttctcttctgtctctccctcctctgttgatatggacacaccattcctttggcatgtctagtacagaccagatcccctgctgttgttagcattcctccctctccctggaatgttcttccttatctgtctacctgataagcactgagtcatcctgcaaaactctgcacagctttcaccttccctgaggagcctcccctggccagccccaccctgttgcaggcagaatgcttggcggtgggttgctgaccacaaatccattccccctttattccttgccaagggaatgctgattttgctcaggttgtcaaccctcagggaggtgaccctaaacatgccaagtccaacacactagctctaccccctgagagcatgagaacaacacggatgggcatgtgcccggatctggctttgccctcatggactgcaggtcaggggtgggaagctcttatagagcagccccaggagccctaggggccatcctgctggccatgccatggcagtgtcagaaccccaaacagcacctggggtgaaggagctactgaaagagtggagagactccactttgtcctgttagatctgtctcagaagtatttttattaggattgactgggtaagctttcttccacagggagcctaagggggcccagagattcttctcagaattggaggccatcaaggattggctcaggctcgctggctactaggctctcctgttcccaaagtccatactcttgtttgttgttattcaaaaatatttgttgaaagcctgctatctactaggccctgaatgtttaaaaacaaataaagttcctgccttcaaggggctcacagcttttctgagaggacacgtaaacagataaaatgtcattagggtgtagttctgtgtaatagagggtgttcttaggtgctgacaagagcatctactctgtagtttaagcagaaaacaaatgtatgaaaggctattggacggctcacagaattctgtgcggcacgaacactgtgtctcaaatcatgctgcaggacaaacttggggctcagtatgctggaccatgttgtgccttctctcccagccagtgctgcaatggaagaaaaggaattcagctcctaggaaatgcaaaacattgatctgaggatagagaaggagtatatgtagatatcatctcttggagggaattaaaaagcaacgatgatagagctatggcaaggctacaggtagggaatacctatggcaaagaaaaaccagagctagacgataaagtagtaaaaccagattttattcaggactattgcaataagcgaaaagagacctcaatatacagtcaggctcattctaaaaacagcatgagaagttgagacttggagccatggagcaggtaggagttgaaagatggaaaattaccaagaggaaatgccaggggtgagggtgatgttggctaaactgacctaacaggagacctgctgaagaaaggccagggtgaccagacatcacctgggaaggtggaggatgaggaccctgatcggatattgggagtggtcagataggaacaaggggagttcttgctgaattgacttagtgggattcttgctcaaattggattttacaagaaagtacacagatgagcctagaaggttcaggagcctgactcaagtttgctcaagcaaagaaactttgtcactattcccttatttttcccctatgctgaaattaaactgggcagactccaaattatctttaaaaacataggtgtgtttttaacaaattccaaagagcaattgcaaaagcacctgtggagcgtgtctgctttaccagaagtgcccaaaaggttactccagcaaaaatgattagcaggtgctgtggatgctgctggtgtcctggccagggcccctttgcttccttccccaggtgccatgggggtcacctggtgggagtcagcacatggggccgtgaccccttacacccatgctgctccagctctgaccccaggcagagagagcttcccctctaatctgaggagacctcttgcttccaggcctgtcccacatttctctgctggcagggaggcagtgggggtgatgtccattctgccccatcaggggagatgatcaacttcatgactctgcttaagcagatccccttgctgggcatgtacttggacttgaccaaatttccttggctgcagctcttctcaaggctcctgtttggccacatgaggcctgttttggggtgggctgcaaaagaacccatcgaaccagtggtcaggggagcttgcagggcagagagatcctctaagtccttccttccttccttcctttctttcttctttcttttttctttttttttttttttttgacagagtctcgctctgtcacccaggctggagtgcagtggcactatctctgctcactgcaatctctgcctcccgggttcacgccattctcctgcctcagcctcccgagtaagctgggactacaggggcccaccaccatgcccagctaatttttttgtattttttagtagagacagggtttcaccgtgttagccaggatggcctcgatctcctgacctcgtgatctgcccgcctcgttctcccaaagtgctgggattacagactgagccaccacgcctggcccctctaagtcctttctaaagagctttggcagaaagcagctaggcaatggctcagaagtgaaagcaagtctgcacacaaagcaggacttgaactgaaagaaaaggaataagaattctcacccagggctgggatccaagagacgcacactgatacaactactaaaaggttgttaaactcccgaagggcccctgccttgctgtgttatagtctgattgtgtattgttgaagcccttacccccagtttgctggtgtttggagatgagcctttggaagctaattagggttagatgaggttatgagggcggggccctcatgatggtatagtgatcttatgaaaagagcaggagagagagagagagctcttccccccgtgaacacgtgtaagcacagaggaaaggtcatgggaggacgtgtcaaaaaggcagccgtccgcaagccaggaagaggccctccccaggaactgaattgatcttagacttcccagcctccagaactgtgcaaaataagtgtctgttatttaagccacctatttatggtattttgtatgtcagtctgaaaagactaagacatgttggtgaatagctgctgcacccccaacacccaggagcctcccctggggccccacagacaccctgccatccagcactaagggttgaggcctggccctgcaggggccgatactcgagctctgctccacccctgcagacagcagccattcaggtgagtgggttgtgctgcaccagttgttaaatattctgagcaccacttgtggtggatttaaaaacagcccccagattcgttgacactcttctcattgacagattgggtctgtgtcccctttccttgaagctggggtggcttgtggtgtcttcaactgatagggcaccggggaagtgatgccatgtgactcctgacgctaactcacagaaggcaatgtggtgtccttcttgtccactgggagacggtggagccctaccacttgctaccctgaggccaccatgctggagaagctacgtgtaggagcgcaggggacagtcccagttgagcctggccttccagccatctcaccaggggcccaacatgtgagtgaagaggcatccagatggttgcacccctctgccctagagtcaccccaaccttcaggtcttcccaactgagactgagtcgtcttacttgttgggtcagagacaagcaccttgctgtgccctccagaactgctgacccacagaatctgtgaacattatacatgaggattttatgctactggctctggggtggttcgaaaggcagcagttgtaactgggagcccaccctgtatagaaatgtgaggaaactgaggctcagagagagagtaagtgactcagtcactgatatagtttggatatcccctccaaatttcatgttgaaatgtgatccccagtgttggaggtggggcctggtgggaggtgtttaggtcagggggcggatccctcatggcctgatgctgtcctcaccatcttgagctctgacaggatctggctgtttaaaagtgtgtggcacctccccccacctctcttgctcccactctcgctacgtgatgttggctcccccttcaccttctgccatgactgtaaggtccctccagaggcctccccagaagctgagcagatgccggcaccatgcttcctatatagcctgcaggactgtgagccaattaaaccccctttttaaataaattacccagactcaggtattgctttatggcaacacaagaatagcctaacacagtcaaagtcatggagctggtgcagggcagagccagaatctgcctcccgtccaagtgaattcagagcccacgctattcccatctccctgatcaggctggttcctgggcacacgcttacccctcagggccacttgaggggaagtttgcaaactggagcatgttcaggggtgatggccccaaacaggctccaggagggaccactgaagggactggggacactgggctttgacagaggtcatcacagaatttgtgggccttcttcagatatccaaaatgttgttactgggagggaataagtgttgtggccctagatggcagaggtgtgggcttgatgcggctgattttggttcaggtaaagcaagaactttgctggtcacatccattggaaaaagattgggctgtcaaaggacgcagtgagtcccatctttggaggcagccaagtgcacccggagtactcaactgcaccctgagtatcaccagtacaccctgagtacccaagtgcaccccaagcacaccaaggaccacccctgggtggatgccaagggggtagtcaggccacaggttggaacagcaccagctgactttaaatccctctctaaccccgagatacaaggatgtagcctacacatcaggaggtgaatagaatctaccctcatttgcaagagttgtccccagggcagcggtggctgcagcccatccagtgttcccactgggagatgcccacgaggtgctcaggtacagcccatccagtgttcccactgggagatgcccacgaggcgctcaggcttcgtggctccccaaagctctgtttctgacaaattaaattggtcctacactggtccctgctaaacatccaaagatactttgagttgaatacaaatctttattattttgaaaaccacagcaaaggcacttcagaatctccaggtacccagtctcagttgccgttcagtggggacaagagtggtgctgagggcatggtcacacccttctgtgctgcatgcagaggggtgcaaggccagggcagctgacctggtcagccaccaggggagcccacgcctcttataacacagtgtccttgggtcaggaatttgtagtttattttgttattaagatggcgagagaatttttcgtccatttagagcctaacatttttagatgaatgttaatggcatctcggttgggatggattcgtgttcgtttctcagctgctgaaggatgtgtgttctaaaacaaaagggctcccagccagctctccggctgcatgatagagaagtgttttgtaagacgcttgttaaaaacccatattccctggcccctcttgtggagaccctgtttcagtagatgggaatggggctggggtctgtataacctgtgcccaggagactctgtgaccagcttgggaagctcctgcagggaggaaggaatgatccacaagtccccaagcccttcatgctgaggcatctgtctggctggagaaacactaaggttggcattgtgctcacactgggaaatgacctggaggaagttgggaagaggagtccaggccggttccaccctctgggtcagaaacccggctggaaagcactggaaatagggaaatagaagactgaaaggctgggacccccctcacacccaacctgcgtccatggccgaggttgagtgaggagtcctggagactctggcttcatggtctttgctcttgttcttctgtgcctcaggggtcgctgcccaccaggctcagcagggcgttcttgtagtcgccgctggtgtcttcctgtgggcaggaggcgcataagcgtgagaaggggtttgcttgtgcctggctcggcagtggcggctgtgttattatgactaagaggtgtgcccctggcctgcacctggcccggccctccagggttcctagccgcaggggttgtgccatcacccctctttcctggtttttaatttcaggctattcctttacatttccttttgattctcttaccaactacatgcaggattgatgtggaaaatgaatcagagacagttccactcctaaacaaggaaggggtcagctgtcccagggttcttctattcgggagccagggtgcccagccattcatttacacaacacgatgcatcattattcaacacctgctgtggcagcttgggaatcaaggctgagagtgaggcatcagcacacacctgggggcagggccgggggtggagggagcctggatcatcgcaccctgacggtgtggccgaggcaagccccttcacctctgtgggactcatctatgaaatgagatcgatgctgtgctgctgtgcatcttgctgagacgtggtgagggtacagcaggaggaaggcgagctggtctgccctgcatctggctcacatcgggtccacagtgtttgtctcctgatgagactgaccttgtggtccgatgactgaggagccctgtttcttagatactggtaggtcctgatgggactggctagtccggggtctgcatacagagctgggaaatgggccaggtcagatcacccagattcttcttcatgcagttgaggacagcggggccaagagaggggagtgaattcattcacaacggcatggtgagtaaggggtagactggggctagacccactttccacactctggaccagtttaggtctcatggttattgtctacttttcaccatttagtaaaatttgcctgctttgagcctgaaatctcattacgggtttcaaactacaatgaaatttttttaactttttcctttctagacacggtctcactctgtcacccaggctggagtgcagtgatgcagtcctagctcacggcagccttggactcctgggctcaagcgatcctcctgcgttggcctcccaaagcactgggattacaggtgtgggccactacgcctggtgatttttattattttgaagacaatttttctaatagtttttagaaagaaaagcattaattttgtttactttttcaaatacatgagttatacttggagtgtttatacatttgcctcttaatttcaatgcaggagtttttaactcatattagtgttgaaaaccatttttgctttaatgacatctgtggtctacactaaaaagaaacgtttggtcaatgtattcatgattctaactcaattttcttaagtaacaacattagataaaatttgaagagggtggcttcatgtatctgtagaaatctctctgatgccgtaagttaccatgtgtggttaaaagggttaatgacaatcagctcagactgtctgcaggtgacagcacagtccaggctggtgtgtgccttgccctcctgtctcccgacaagattggctggggagcctcaagtgaaaccaagaataattccaatcctctcttgcccctgcccacctgtttcaagatgttgccatcttgaaacatctggaaacagaaatgtcttttccacctattgtcagctatgtgtttcttgaaaagtgcacttaacaacgacatttgcagaagagctagagacttgacttagtagccaaagaaaacttggggatacatttgtcctaatgtgacttctgctaatgaaatcatcaagacctcaatttgcagacacccccagaagagctgtttctcccaattatcgcagcgtgataatcagtctgtgttttgaaggctccagaacttttgctaattggaatctggttagatagtctattggcgctcatctgacttatctccttagaagttggccgccaggactacttaaatctggatttgagcggtgggcccgattcctaccggactagttcatctcattgactattcagaggtggcttcttctgcaaggatttggtgtcttttccaaggagcaaccataacttaaatgtgaaaccaactttctgagtgggacacaggggagcctctgtgccctggtctctgcatctcccctctgccccccattccccttgggatccagccacactgacctctgctgttccctgcacacaccacatggtcatgaatgcaagcacatggtgcccactgggaagggaggggctcacgtagtgttggccacagcctccaggtttccctgaatgtctgggtttcaggctggcctcagcattgggaatgcctgcttaccatgatcatgctgctgagggtcttgccgtacatcttcttgaagtgacatttgataagatttaagtcaatctcgctccttgaaacgatgtttcttatcagggtcccatcacgcgtccctgctccctgggcaagacagcagccatcaacaatcctgcctcacctttcctgtccatctctgagtgatggacggatctgtgtggttgggttctggggcttttagagggagggagatgtgggaaggagcctgtgcttcagccagggaagcattaggagggaagctttggtggcttagggtgtccactcccttaattccttctcacccactgcccagaactcttcctttatgatgccaagtgctccaaactgcagtatgtttggtttgccacatcagattctagacacaaaatactcactgctccaggaacaagacttcctactagagcaatggcagcaatcagctcagccaggaatttcacaggcagggccttcctgctcaccttcatccctgaccagtctcatgtcagctggggccacatggccaagggaatcgcatgccctctctcatttcctgggcagaagtggccagagggcttgggtttcgggtgtggaactaacttcaggggatatcagcaaccatcaatcagagaaaacgggcaatggttttagtttcagggaattattcacctctggagatgcagcgtccctttcccagactcaatttcacctccgagaactaaaacctttctgatccacgacaggtttgggtaagataactcccccgtgtggaggatcgtggtggctttgagctccttggctttgcacttggtgctatgtagggtgagcgtcaggaagaagaagacaggacagttaccttcatggcatagtagagtctctctgcaaagtagctgtggaggttttgggtgcatttcactggcaaacaagaaagctgtgttaatgtctggagctggtaggtggcactgcctacaactttatgtcttgccttaggtcttaagagtcagtgttgtgcaaggcttggcatatttctttgttccgtgcctttcccaatgtgagaggctttgtgtcaggtggcgtgggacagggaaggtagcccggggcactgggcacagctccaaaggcccaagcaggcaggcaaaagggtaagatgtgaaatgcaccagactgtggggctcgtctgaagacaccagctcaagcccatccaagggcagctcagactcaggacaggccctgggctctcaacccagagacacctccaccaaaaatccagcctctcagctccacagaagcaccatgggatggtggctgctggcctcagagtgccctctctctcacacttatcagcaggaaccctgcattttgaattcccatgtgacaagtggagtttggccccacaggactaaggcacctgggggcgtctggtccagagactgggcccatgcttgctcccatgggtactgctcagagacttggcatctgggtggggaaggttggcattttcacttagggctgcagaaggagcatgggctttgagtgaggtaggcatgtgttcacttcctgccttgatggtgcagtatggcttcattactcaacctccctgactcatctgggaagtgagactgatgcgaggcttcaaggtgaagtgaataggaaggcccagcatgacggagcactgcatggcttcactattccctgctggcagacttcattcttggtgggttcaggccagatccaggggtggaagctgagattggagcaggggtgtgattagatgtcctgacatagaccggattgtatcacagcatccaaggccagctggggtgtctcagatggccctgtccacccagagaggctaggaaacagcagggagcctgctggctgctggctttgcacggaggcagcctggtgtggaggtgagagctgcaggccaggagtccggacctgggctctgtgtgtaagtgggagaagagacgtccctctgccctgggcctcagctctttactctgcagtgactcttcccattgtgatctcagccctggaacccatgagagctctggagtgggtcctcctgagtggccctgacttcctgctgtggggaagatccccagtgtttctcagcatcagaccatccgtcactcagtttggactcaagccacacatcactgtttcttcaactggcaatgaaggcaggggccaggcccctggttcatgtccagaaagatgactttgtgctggccagggcttcacaaccacagccagagtgctccctgcatggctgccatgagtacacacagggttggggctggcataatcactggcgtatgcatttgtgtgcgcacacacacacactgtctgtctcacacacacacactcacattccacccacagtcatgcacacacaccctcaggcacacacactctcacgcacacacacactcatgcagacacacccacacagcactgggcaccacgtgggcagcacagagaacaatctttggcagcacacactgggactctagaggtggagcagtccctgggtgagggagacaggcagagtgtgagtcggggggacatcccgtgaaggtgacacagggattctttctcttgtggtcgcatccctaggccctttgttctttggtgctgccccacggtgagccctgtggcctgaaaaacgtgcaagtctgagctcttacccacagtgagcatggcctcctccagtgagccatgggtctcactcttgatgctgtcctcaatgctcttgttggcaattttctcatactcttcaaacactgtggagagggctctgctcaggggatggtcagacctcctcgtgatgcccctcagtgtctcggatcagagatcgcacatcaatttgccgccctgacctcccactggtggctggggaaacagtcctgggctccctggctctctccctaactctagacttgacaaggcagaagcacgagggagaggctcatggccaggacaccccctgtggccccggccccagcccctccctccctggtacctctcagcaggtgagtggcactgcgcgtgcacaggatggtgatgaatttcatctcatcagtcccacgaatcttctcgcctgccgcatacagatcctagcattgggacacccacaataagccagtgagggagaccagggaggtgagggactgagccccagagtcccagagctgtggccatggcctggccctgtccactctgccaggccagcatgctcccctgcttggtcgtctctgacagggagctcccctttctctagcagctctggcttagaatattttctctatcctgggccacaagctgctctaggaactgcctggtccccagacttccctctgccagcaggcagacctacagagacccggacacctgtgtccagcactggggcctagcgcccccgggttcatgggctgttcctgccaggacagagctttagtgctcccccacccccaagtcacactccttcctcccgagtctcccaacaccctcactctcctccccagacaccacaggacaaaggcctatagggagctgagctgggtgggtcccagcccagtgtcagagaaagcccccgtgggcagaggagccggagtccagatggcagggggtggggccacatggccggctgggcgcagcctcacctgtgcgtcttggagggccagtcctgggtccacaaagctgctcacatcatccctgctgccctaggaacagaggaggtggctctgtaaggcaggccagctgaccagagcattaagggcacaggggggatcctgggcttggagggcaggcatggctctgctgctctttggctgtggaaacttcgacaagccagttattctcttcagcccttggtttcctcatttgtacaatgggggtggtaaggactgcctcataaggcttggcggattcagtgagctaaggtaagcaaagtgcctggcatgaggcctgcacgaaggacctgctctcctcccgcttccaggatgctctcacatggctgagtaaggacaggtgtgggggctctgcagttgggaccctctaaccatgctgagacacacccaatgagccctggctgctgggctatcccatgcccctaccctgactcttgtggcgctattcaagggctgctccctggggtggagctgttgggactcccaaaccaaggcactcccaagagcctaggctgtgacacctgcaggaggcacaccaggatcctctccaggtagccacttgtgtctgcttggatgtcctcctccaggctggacccatagtctgcagggaaacaggaccatgaggcacaagcagaggcccacagcctacccggggcctgctttcctccttccagccctgttccccatacttctccttattaaagccttctaggaaagaaagtccttggcacagggcatggatgcaatgcccgggtgtccaagtggctgtcgcctgggtggtgcttcacaactagaagcgacatgcgtacccaaccaagctcaaagcacaagatggaccaggtcagagagccaggctaggggctgccaaccaagctccatttcatctcaaggcttggcaaagccaaagcctccaggaaaactccccactaggtacatgatgtggaggactgactggcctctgctagcctggggtccacaccccctactaccacagtcctcaagggcagagattttagttggtcacaggcctctctcccctgtaagaggagctggtgagcttacagatcaagtctgaatcatgttcagtgtcaccatcaggcacagatcttggcatacggtaggtgctcagcacctgtgggtaaaaaagtccccaaagggtcctttctagtgtggcccaggttaattcttgatccttgttccctgccaggctgccaaagcttgtggccactcctgagcccctccatctgtgccaccccttaccttcctcatacgccttcattatctcccgcagctggttcttggtccgagaggccaggatctcaatgatgacaccctccttggttcctaagccctgtggacagaaacctctgcctgctggagtgctctgccatgaccttctgctctgtccacaccttcttttctcaagatgcctgagcctcaggaaggacctcactgccctgccccacttgaagtgggaggatgtgatgagaaaatcacatgcttcagtgatgaacattgagggcaagtgctgtgacggggaagccctgtctcagctctccctccttagctgggtggtctcagacaggctgctccatgtcctggagcctaagcatcccgatccataaacaggaataagaagcctcccctgcgccaaagatagattagggagcgtgggtgtaaaatgcctggcagtgcccatgcagcaagtgtctttccaaacaaaatgactatagttactgggtccccatccttattaatctgcaaaagcaaagagtagtgagaggtaaagggaaacccaaggggctgtgcctgggactgtagaggtgggtttccaataccactgtacacctgagctcgtgaggttctgagaagtactgattttggcttcatcacggccactcaacgtgtcaatcaggcaccagtgactccaggtgttgggtgcagtctgagcagcaggctgcctgctcactgggcccagttatggcccatatggccattccaaacagtggctcaaggggagctctgggctgtaggttcccggtccccgcattgcccctacccagtcatgtgagcacccctgccactcccctgccctgtctgcctggttaccttcatggcgtcatgcagctccttggcttcgtatctgtatggcgggtacataagggccacaatgagcctctcaaacttgccactgagctcagacttcaaggtctcagtgaggtcctaatgcgggaacagggaaaggtgatatttgtcataagccaggcccacctgagtgcaggcagcggagtggtggctgggtccaggggcttgggctggattctgcgtgggccttgccacgtgctggctgggtttcttgggccagctccttagcttctcttagcatcagtatctttaccggttacacggagagaaacgtgctcctgcttcatcccgttgcttagggggttgtgtgtgactcaattcagcattcagtgcagtgctgggcacatcataagctctcagtaaaatgaaattggtattgctagctagactgcaagctctgagtatggcatcaccataaaatacctgtcacttggcactcaatgaatgaatgcatgcctgaattaaagacttcgtctcacatgtgcctccttctaaggtcacatgttgctacgaggagccaccaggctacatcagctgatctacagagcagcagagagatcaagggctttgtcagacctggattttaatccccaccttgttgattacaggctctgggaccttgggcaacttaaaacctctctgagtgccagtttccccaaatgtttgaatacaaagaatgtatcactgtgaggactaagagagggaaactgtaaaaatgcatactgggttctccaagagaatatttgagctgatcttccttcgttacatctccaaactaatgatatgagtcactagaggcttgaggcaaccatggctgtgcacatatttaatcctgtgtttactgtgtacccccaaatgtcaggctttgtcctaggggtggagtgcaggtgggaggagaaacaaagggcctggcatgcttactccaggctcttagaattcccaggtggcagaagggacgaggtgtgggtgcaagcagctcgactgaggaaagcatgcccacgccccagaacagagcaaagccaggcctgcatgcctggggcatggaaaagagaaggtggtctgggctcagagggcagggcgagatagcctgggggcagggagacagacctccagtggggcctgttgggtgcatgagaaggaatgctgtgagagaggaggcaggaaaggaagcaaggaaggccagcccccggcccgggctctgacacctaaaagtagatctgccagataaaacacagggcagccagttacatttgaatttcaataaagaacaattgttttcatgcaaacaggttccatgtgcccatgctgccagtgggctggctctaggggaaagtcgtccagaatggagctgcctcccaggctgtacccccaaccccaaggctcacctatccccacccccaccagccttccccttgccttgccgaactgagccttgaaggacttggcgatctgctgccgctgcgtgttgcttctcttggtgagcacatcgatgatagcctgctcgttggtccctgcagggttacagcacaagtgaccctgctgcccccagggtgacacactggtgagggcggaggaggggaaggcgaaggcagctgcttggtggctgagcagttgggacccgacacctggatagttccaaacccccagaccattttcgtggtgtaaacaagacccttaggaaatctgcctccccatttcccaccccacacccccacaatgttggggcgtgcccaaggccagcctcacaagatggaatctgaggtctgggtggctctggacatcagcccgggcctttggagcttggccgagtgagatctctggccctgccctcctttgtgttggtcgcagtaggggaaggtcaagactaagagtccaacccctgaatccgaggcctggcccagcaactgcgtggcattgggcagccagcctcatttccctgggcctccgttttctcatttgggaagtggagataactttctgcttcacagaaagcagagggcatgagaacgttttctgggcttgtcaggagcggcagttctcattaaggcccctgatcctcaggcagagccggctaaggggtcagtcccacctggggtgaggtcagggtacatgctctgctctcaggtcaggagggctttctgggcaagctgtttaaatctggcctcaggccagccctcgcccactcacggtagtgctgagggcagcactgggcaagtgcaggagatgggaagggagccggctccatggccatcgacatggggcaagggggccttgaatcagccccacaaactcccaacacctcacacccctggcagctctgtgcctggcatcataaagcaccacccccttcacacttcatgtgacacacaaggccaagaattcttggggccactttacaagtgagaaagctgagactgatgggaagtcactcacagagacacacagctcacctccccacccccattacccagggaagagcagcaccctcctgtccagtcttgcagggtgggtgctgacctcactgcagaaacagagggctgtgtgattctctgggtagtggaatcagtttcagagtatcatgggacaccccagctccccagatgtcccctggcacccgctttccagggctgtgagcggaggggtcttgagcagaggtggcaaggctgccaacacccactcaccgatccccttcatggcttggtagagggtctctgcatcagggtctgggttgaagtgggagctgctcttcactgtgacaccctcctgttcaatctgcaagagaaccaggcctgctcaaagcaggcagggacagggagggcagagcaggctcccagcccatctggtagcccgccctgacagggtgagccccttccctgggcacggagatctgctcagcccttgcaggccagtgctctgcccttcagccccttggccaacagggtggagtagccagagccagagcttgtggggagaagccacaaaacctttcctgtccctgtctgtgccatctgactgcagacagcagccccagccacacccagctccttccagcatcacccaccagcagcaggaagggacaaactcacccaaagttaggaggggaaagaacactgaagcaaaggcttcctggagctgcatgcaccaccttcagagtgtgcagatgaggttggaaggctgagcatggttctgcctttctgaggaatggtttgagctcagtctgccctcttcctggggagttgggacttacagcaacttagagggcaggggcccagctgagcatattgatagttcagggtgtttgcaagtccacaggcccatggggctcagagcgtcaggtttagaaaaacccgcacgatgctctgcagattgtgaaataaaccagataaccaagtgcctgagcccttgatttccaagcctccagttcagggcttgcctgaaggctctttaaacttgtgccctgcagaatttctcagatgattaacatggacataagtgtgttttgggtggaggaatggtagagaatggagggatattggagataggtattgaattagagggagactcagagatcctccaggatgaaaaagagtttagtcccatccagtcttgtcttccatttacctgttcacttattccttccatcacctccatcatctgcccatctactttcccacctacgcacttacccatttgactaccacatccatccatccatccacccacccatccatctatgcacccgcccatccatccatccatccatccatccatccatccatccatccatcgaagccctgggttagattgtgaaaatacagagattccaatggatggtatatctgtaagtatctttcctttgagtaagaggtaaggcatctttctgaactctttgctttaatttcaaatgtctggtgacagatcttcctgagtcatttcttagcaccatgtttcacagcagaaattgttagaaataattcctatggaaattccatccagagagagccagtgtggtcccagatattgctcatcggtgtccacacacacgatatcccttgcttgtggagtcacgctctgctattactcctgttagcacttcaagccccttgtgtgtgccagacctgggccaggtgctttagaagcaatgcttatgtcatggcttcctcaacagttgtgctaggtaagtactgatgcctcactttacagaaagggagctggactcccttacacagctagtaagtgatgctgttgggactccccagcctgactcagaagctgagctctatctacctcccctgccctactgatgactccacctttcccagacaatgagtgttcctggaacgttccactgaaggaagcttcacccacaggaacgcaggtcatctgggaatgtgggaggcatctcagctctcagtgcctgccggcttccctctgccccagcactcgggggctgtggtgcaccagcgagtggccaggctgtgtaaccgcatccctgaggagcatgcagtcccgcaggggtgcggtaggtctcaggtgcagcatttgtaagcagctccctggctggttctgattttgctgcattgagaagcctctgtctcacttcccactctaaggttttagaaaataagtgttctgggaatcggagccctggctatcagtgtggagtcctggagctccagacctcctgctgagaaggaagggtcagcctcaggctcctgcagggtcttgcccagggccgtgctagtccagacaggcacattttcactgaaaaggtgactcagaccagcctgtgactacatctattaatataacttgttctgtgacaggcacaggggagctgccacgccttggccttcccctgctacgtggctgcccagaggcctgggagatgggtttgtctctatgagagacacagaggaaaaggcaacaccaaaaagagaggtgcagatggaccctgcctgcagacagatctctctccagtggctccctcatctcctcccatcgcgttcctggcccagctttgtgcctagaggacactgggtcttcgctagcagctcagctgttgcaggtggggtctacctgtgaacttgctacccctagccagctctcacatggggtatggacgaccagggtatggttttggccctggagtcaggctgttcagattctcacctagactctcacacttactagtgagttcgggcacctgcctagcctacttgtgcctcagtttcctcatctgtggataaggatactggtgtctacttcatagactccttgtgaggttcaagggagatattgaatgtgaggtgcttagagaagggtccggccacagagtagggactcagtgagtgtcacagtgatcctgtcaatttggcaggtccctacatggacagccctttgtcctgctgcactgggtgcaaggcccagtgccagactgccttggccagcaactgactttggaaaccacccagcactgggctctccctgccatgtccacctcctcaaaggcaggttcccagcagtctggttgaagctgcaggcctccatggccccttgtcctggaagaaggctgcttccctgggggccaggacagctgccccacctcagcctggcttcctctttgtcccacctgtccagaacctagcatgtctgaccctgaggacacttgcttgggttgcgacatctatgatccagagactccctgaagctggacaagcctgggtatcccacaaaagctcacagagaacctggggctgggcagagagacccaactgctctctgactggagcctgctggccattggaccctagcaagtcactcagtgtctctgagccttcatttcatcatctgcaaaacagaaagtgcagccctgacatcctgaggctgcctgggaggaaaggaaaagggtgtgcagagccggcagccgggagatgtcacctctgtccccttctggatattcaactccttagcacagcgatggcctcaggctcaaccatagatggaaagctcccgagaacccatcagttctgctggggatgggctgccctgagccccgggttcctccaggctctagcaggccaggtcctcctgcttcccctcttccctctccagtcttgacaaatgaacatcattgatccctgaggtgaaggcattgatgggtccccaacagcaggttcaggttactctcatgctcaaagcccttcagtgccttcccacttctcttaaggtaaagcctaactcctcagcctgccaggcaaggcctttcaggacctggccctgcctgcttccccaggtccatctcctccggtaccaggacccttgagctgtgctgagcagcttccctcgaagccaagctccctgccctctgaccctctgcacacagttccctctgccaggagcagtatgcctgattctccccaaatgcacacgtgtgtgcaccccatacacatttacacacaaggctcaaccatgataccccctcctttgagtggccccacccctgcaagggtccctcccctggactcttctcaaacctcagcttcccccttgcatttctagatttcttcatcagcctgtctcccggcccaggtcccatccctgccgtgggcactctaggcctgggactgtttcttctcggccccttcccaccctccatgcttggcccaggaggcagccaaatgtagactgagccactcccagccaagggcgactttacatttctcaggactccctggtgaccagcacccaacaccatgcaggaacccaaatctcctgccagctcccacttacccaggatttccaccaggccatctctttcacctcgggggcacctttcccagggagatgaagagacacaggttggcctctgctgggactccacacgtctggctcctgcagctgaggagtgagcaggccgctcacttgggtgtgggggtgcaagcccgcccagggcagcgccacacctgcctgccgtcccctcgcccccgggctctgcctggctttgggcatctcctgtggctcccaggccccacccagacactgcccaggcctgctctggggaattacacaactcactggcagatatttgggctgtggctgttacgcatactggaaattcttagctccagcctgcgaaagccccactcagtaaacacagctccatgttgattaggctggtctcaaactcccgacctcaggtgatctgcccaccttggcctaccaaagtgctgggattacaggcatgagccaccgcacccagcccattttcatcactcctaatagccatggagtatgccatttaatcaactgcatatgcaatattattttttttttccgggggcaaggggctcatattcaccacagatgggaggccagttggtgagaaggtggcaggcggcacagccaccttatacagcatgccatactggtccactgtcagaccggtgatggcctcagctccatcaccccccaggctgactctggctcctgcctggctctgcccggccaccacaacccctcgggaccattcagaggcatcactggaggatgtgtggttagtggagcagctggtcatggggaggtctcgtttctttggtggaaggcattcctggttcctctcatgaacaggtttcatattgctttgtggtgttcctggagcctggaaggagttggcttgctccctggggcatcaggaggggcttctctgtagcttctctgaacccctctctgcttctggctggggcacctacatctgagcttccagtggtgcttctgagcagctgtagtaagcgtcctcccggctggctcgggagccagcccatttcaccacgcttcccgggatccacccgctcatcctggagccgctgcaaacctggccgccgccatccccagccccggagctgccccatacccctgtatatgcaatatttgttaaccattcccttttggtgcccatctaggtacaggtatcatttttggagctaaagtatctataatacactggaagtaacagatgtcacctccatattgtacgccaaacctaataagcagagcaaaacttttcatccaagcgatttggttaacattttaggatgtttctaatctctcagtaatacaaatatgctacaatagatctgtgtgtttatcctttgggcacctgtgtgtgcctgtgcatacctggagaataaagtcctgtgagaggaactgccatccaaagagggtgtttcagtctgtactgccaccaacaatgtgcttgtgcttctgagcttgcgtttgggtcaggagaatttgaaagtcatcaggaaccaaaccaggatataaggttcagctgtagctggaaagtggcaagcgttccaaagctaagacattggctatacctgggctgttcacaaactgtgagtccaattctagatgagatccagaagtatggtgagcaactcacttattttttaagcaaaacaccttttcttctcatttctgctaagaacaaatagcttccagcaagagaaataggggatgcaatatttttacaaattacttctcttttttttaattaaaaaatgttaagttaaatgctacttaaagatatgtttaacctctatgatactgacttgctcatgagaaggagagagggccaggcatcttgcccactactacccactatcaacacttaggcctgacatcagtctctaaataaatattctgggccaggtgcggtggctcacgcctgtaatcccagcactttgggaggccaagacaggtggatcatgaggtcaggagatcgagaccatcctggctaacatggtgaaaccccgtctctactaaaaatacaaaaaattagccaggagtggtggcgggcacctgtagtcccagctactggggaggctgaggcaggagaattgtttgaacccaggaggcagaggttacagtgagccaagaacatgccactgcactcctgcctgggcaacagagtgaaactccgtctttaaaaaaaaaaaaaatcaacagcagcttctaggatgatgagcagtgactcagtctctccttgaccagattctgtaaccgtccagcagaaatgcttatctgatctctgcgagaacaggaagcagctcagtgggggccttccttgctaaattcttcatcaagctggtctgttatctgccctgagtcctgcaagaacatctcaagaaaaatcccaaaaacatgcaagacaaatgagggtcctcccttagcatgtcttgaagcactgaggcacctgaaagttgtatatagtttctggtgaaacagttttttaggaaatgaagcacagacactaactattcttccagaagagccccttcctgacatgaaagatcttacttagcatgacagagaagcatctgtttcatcatgaggacctatccaaccagcagcaggggccccagtgccagtgtccacctcagcagaggagacacgggggacatgcaaagtgtttctgttgaaaaatacttcacctagggtgactatagttagcagcaatgtattgtatatttcaaagtagctagaaggctaggtacagtatcccatgcctataatcccagcattttgggaggcccaggcaggcagatcacctgaggtcaggagtttgagaccagcctggctaacatggtgaaaccccatctctactaaaaataaaaacaataaaaaataataataataaaaattagccagagatggtggcctgcgcttgtagtccaagctacttgggaggctgaggcaggagaattgcttgaacctgggaggcagaggttgcagtgagccgagatcacaccattgccctccagcctgggcgacagagcaagactctatctcaaaacaaaaacaaaaacaaaaacaaaaaaacaaagtagctagaagaagggacttgaaatgtacccaacacatagtaataccaaatattcaaggtgatagacaccccaaacaccctgattgatcactattctgtgcatgtaataaatacttaagtgtacaccataaatatgtaaaatatgttatgtcaacaagaaaatactttgcctagtgtttccatccaaatgggaataaatccagcgctcaatgtacacatgtcatggctttttattgagactggggaagggccgtggtagcaggtgcactcactgtccaagtttgtccagactttctgctgcatgggtgatggcatttgtgactgtgttggtcactgtctcggtgatttccttcatctttttgtcccctgactcctgggctttctttatggcttcagcaatggctgttggaaagaggaagaatgtcctagtgatccacctgctgaacttgtgtccccttgagtggcctgtgggatgtggccatcttaatggattagtctctggagtggcccgatgggaccaagggcagcaggattactgcagaatgaatttgaatttggttttaatttccccaacaacttgcatttcttcaactgtgagtgagactgagcatctactcatgggtacattgcctgcttatccttttttctggaaaatgcctgcttatgtcttttgaccatttttatattgggttgttatattggattatcatttttatgacaaatatttttcatcagtgtataatttttcttttggcttggtttatagtgtttttttttttggctatagaaaatttcagttttggattgtcaaatttacttaatatttcctttatggcgctgatttttttgtcatagttctaaagattctcccctctccaagattaggccaaagtctctgatgttattactatgtctaaatgtttacgatgtcttccccctcaaaactcatatgctgaaatcctcagtcttaatgtaatgatattaaggggtggggcctttgggaggttgaaattagcacccacataaaagagaccacggagagctagctccttccaccatgtgaggacagagctgggcccatccatgaaccagaaagactccctcaccagatgccaaatgtgccagtgccttccttgatcttggacttcccatcctccaggagtgtgagaaataaatttctgttgtttctaagtcacccagtttatggtttgtttttgtttttgagacagagtcttgctctgtcacccaggctggagtgcagtggtgcaatctcagctcactgcaacctccgcctcccaggttcaagggagtctcctgcctcagactcctgagtagctgggattacaggcatgtgccaccatgcccagctggtctttgtatttttagtagcaatggggttttaccatattggtcaggctggtctcgaactcctgacctcaggtggcccacccgccttggcttcccgaagggctaggattacaggcgtgagccactgcacctggcctatggtattttataagagcagcctgagctaagatgtttatctcctagtaagttaataaattcatttatgtaaatgtaagtccttcatctacctggaatctattttgttgaaaaggaatgagatatacacatgctttgtacatagtactactcatagctcacacacatcaatttaacatttaacatagaattttacatgttaaatttttttttttttttttttttttttttttttttttgagacagagtatcacactgtcgcccaggctggagtgcagtgtcgcgatctcggctcactgcaagctccaccttccaggttcacgccattctcctgcctcagcctcccgagtagctaggactacaggtgcccgccaccgtgcccagctaattttttgtatttttagtagagatgcggtttcaccgtggtctggatctcctgacctcatgatccgcccacctcagcctcccaaagtgctgggattacaggcgtgagccaccgcccccagcaattatttttttctttttttttgagaccgagtcttgctctgtagcccaggctggagtgcagtggcatgatctaggctcactgcaagctctgcctcccaggtacacaccattctcctgcctcagcctcccaagtagctgggactataggcacccaccaccatgcccggctaatttttatgtatttttagtagagacggggtttcaccgtgttagccaggatggtctcgatctcctgacctcatgatccgccctcctcagcctcccaaagtgctgggattacaggcatgagccaccgcaccctgccatgttaaatgttttgtcccagtgtgctgtcacatagtcttgtgtgactttgtcttcttattccacagagagaaccatctagacagtgtcctaacgcagtacagtctgtggcctctgatgagcatagataactgccccagccaagaggctctgaaaggctgcaacattaggggcagagtttgacctggttagtcaaagaacaggttggcccagcacctagcttcccttcctccctccctccttccctgcccgacctcagccggctgtacctttctctccagtctccttggcatgtcccaccacctccttcaccacttcctccacggcatgaactgaacagaggagacaagtccagggtgagggctcagagcaggccggctgcccccgagtccagggtgagggttcagagcagagccgctgccctcccagtccagggtgagggctcagagcaggcccactgccctcccagtccagggtgagggctcagggctggcttatcctcacaacagacctatacatccctgggcatcctagatggggctctggggtgccacccccagccaggacagactgactcatgagaaggaccttcccccacagctggcttcatttggagacgccagggccttggctgctgggagacgagctcaatgagccccatgagggcatgggtccctgaagccccttggccctgcccggcctggaatggcaatgagcaggcagtcttgccagctgagacatgaagcccaggctgggcctgtgtgccaggtcacacccctctcaggatgtgctagcgcctgcctcaggttggtttccaaagcctcatccactaagaccaggtctctcaaagcaattcctccaacaaaacggaattctctgcctacttcagagttttttaaagtgtgggtggtagcgtgctagaactgaaggatttcagagtcagaagaaatggttcttattctaactctaccttccacctcttggttccctcatctttagaatgggaatctgttgggatgatgagacccaacaccaggtcacgggggcggcaagtccagcggagtcaaaggaatgacaaagagacagttcgagagagaaaatgggagcagggcgctatcgcgagtgtggaggctgcgaaggccccgagttctgggagcccacgctatttattggtgatctaacaaagaaacaggtggtgaggatgtggaggttgaaaggaaacagtgtatcaagtgaatgagaaacatatggctacttgagagaatggcagtgctagaagcaaggagccagcaagtctagcaagccctgcctcagcttttctcccaacgctgagcttttctcccaacaggaatcataaaaaactcagaggctagtgaaaggttaaagcaggtggtccacaccagctgcagagtcaaaaacaaaatacgcatctgctgccatttagaaagaggacacaaactcaggcaagactttttcacacgatgacccatgagtggggcctggctgggcctccccacacatacctgctgacctctgaatacaacatacacttcgggaccaggtgcagtggttcacgcctgtaatcccagcactttgggaggccaagaggaatggatcacttgaggtcaggagtttgagaccagcctggccaaaatggcgaaaccccgtctctgctaaaaatacaaaaattagtcgggcgtggtggtgggtgcctgtaatcccagctactcaggaggctgaggcatgagaatcactttgaacccaggaggcaaaggttacagtgagccgagatcgcaccactacactccagcctgggtgccagagcaagactccatttcaaatacaaatacaaataaaaataaacatgctttaggggacttggatgaaattgaaaatgcccttttagactttgaacagacttggtgacttgttaagaaatctttgaagctttaaagttatggtaaaaataaaaatccatcttccttttcctgcataggttattcagaataggctgttttgacaagaaaggctccccagatttccagagggaagggtccaagctgccagtgttcacccagcaccaggactcatgccctgcccccaggagacctccccaggtctgcacccctcaactccgtgctgacttggtagagcaggagaccagggttcctgaggggccaaggcctccccgcaggtcctcgcctgcctacgtagatccgcctcccacagacccagtctgccccagatccccccagcccaggtagaaaggagccctgggtcctcactggctccctcggtggccttctcggtgcggtgggccaggccctcggcagccagcttccccaggcctcccagcatcgtgtggcagcagacagtggcgaactaggatgctgaggactggcccaacatgcttttatagctgcctctggtgcctatctaggctctggggcaataagccctcaccccagcccagtaggaggctggacaggtgagtcagtgagggcggcagcaggaaggggctgggcggagccaccctggaactagggtggcagcatcccctgacagcatgaggcttctgtaaccctgtcctagggaccccgtgaaggataggggcatggagcagggctggacagtagagatctggacatgcttcttccttgaggcagagggcctgagtgccagcccccctgagaccaaagcttcccaagcctgggtactgatatgtacctggagacaaggcctaggattccaagcctgctgctcaaggtccccagtgtggcctagtaagaggtttgggggttctatgggcctggagacctgggcagtcctttgagtcatgaacacaagtggaatgagggtgactgccctccccattcctggagaccctggctctgcagagcagtttgcggcctccatgggacagggtggggcgttcagggtggtgccttgcccgagtcagaggggggcacagcactgggcagaagcgtagtcacctggtgtcgctcagctgatgctcactcacccaagaggctctgtgaggtcagcagtgccctcctatcccctggcagtcctggaggagtagacagaggcctccaccaccactcagggagatgcttctggccttagctagaatcccctaggaagcagcttccctggctcctggtgcatcgcatgaggagtggcagggctgctccctagttactcatgatggacagacatgcctcaagccacctgccacatgctgcttcccttagtcaccagcccaacctgagcctccgtttcctcatctgtaaaatgggcatagcgtgccttcttggctgtgtccctaatcatccctgaggcaaagcatgcaagctcctggtaaacacctgttccctccactcatcattgaggtgccctttggcagtgagctctgaccaactggtagggtgtgccaaggagtgactgggacgtgaggctgccttggagccagagggctggggaatgtgacttctgctggccaggagccaaggagaggtcttcccatgctcctacttctggggtgcaggcctgtggcaggggtctgaggctctctccccaatgcaggctcctggagctgctctcctggatgtgtcggggcctgattagtttactggactgtgggccctcccagcctgggactcgggagctgagaccctcttgcattcctgcatggtgtttgcgggctccagggctacggccagtccccctagggtggacagtgggtatcgtgggcagcaggacctctgggtctcaagactgtggccccacacatgccattgctgtctcctttgggcaggggtgaatcggggcttcaacaatttagaggggcctctttatgaaaaagaatacaataatatgattcttgcacatttttcatttatatacgtatgaacttctggacccagaaggggctgtgaaagtcgggggcctggagctcaggcgggtccagatgaccctgtcctccttttgtaacagccagagtccaggatgctttgcccagggcattgggctggcactgcagaggcctgggggatggggtgacacctgggacatggctggtgggaattgttctaggaaacctcagggattctccctggacctgtcaaagccccttccctgtttcttctgaggctgtgtgtccccccactcacacaagggtcctttctatgcctgctcccctgataaatgtcatctgcctgctctagaatggcttccagaccccacagaccccctcctcatgagctcccaccctagggtactctccaccagtccccgctttcaggagctcaccagacccagacagcctgttgtcagagctcatccacacagcaggaccctggcccactgcccagcccagagccaggcccaccatggcctctggggacaactgcccttccccccaccccctccacatggtcccctgcccatgagaccctgccctgctaatttaatgcactgccttggtgtgagcactgtgattctaatgacaacacaccatggccttctgggcgaggctgggtccagacacagatcccaaatgcctgctggggagaaggcaagaggcccggggaggcccaggacaagacatgggtcccaggccctggtgccctccctcttggccttccagctgctgctgctgtgaccagattcccattcacccagccccgtccatgggccccagcaagccatctgtgccccacagagggcagacccctaagagtgggacccctttctagccaaagaacatgagatagccccaaatcctcctaaacatgatggatcctggtctgaggggctgggctcaggtgactcctgcagggaacttcacctgcctggatgaggtcaagtgtgaatcaggtggggcctgccctccaccaccccatcatggaagaggtccagcccacagtgggcccaagagggccgcccttggacctagggacccaagtcagcatatcctgagtcagaaggtcaagtccagcctcccctcaggcagggagaatctggctttgacaggagcagataaattctcaaggtggaatttgcccaacatactagtttggcaagggactagctggctgaatcactgagtcaaggacagccaacgtttccaatagcaatttgccaacttagcaattaccaattctgaaaaacaatttgtttatttgaaacacttaaatacttaggctgtctcatgtctgaagcatgatgatgccttgcgtgatttaaaggacagacgtcacgaatgccaagagttttgtggcggtccatcctgccagtgtcttctcccacttttgttctgtggatttgagctcacagtttgtgctgtgcccaccgcctgcccaccctaacgagactcctggagacttggctggccagtcaccagaggaagaggggcccagcagcacgccagcattcacccacctgtgggtatcagtcaggctcctggtggaagccagaggacatattcgaatgggtacttgaggaaaggggctgttcacagaagtgtggaccgagttaagggaaccaataagagatgaggaatgtcctggaccagcaagagtgggagctgttatctccctgggtctagagggacaggaaaggtgtccacagatcccaaagagagctgtggctgtagaggaggatcatcaggagctgcagccatcagtagaaagatgtggccactgccaaaccaacaaggaagaatctgagcgaataaccacctctcctctctctctctctcccacctcctatgacgtcctccactgtgtgaattccactagggccagacagtgaggcaccctggtgatgcagtccaagagggagtgggcagagaggagccagtgggtatggaggggaaacagagaaacagagaattccagctcactctgcgggatttctgggtctgatagaaacatggcattattattattattattattattattattattattattattattattttgagatggagttttgctcttgttacccaggctgaagtgcagtagcatgatctcggctcactgcaacttctgcctcccgcgttcaagagatcctcctgcctcagcctcccgagtagctgggattaccggcacatgccaccatgccttgctaatttttgtatttttggtacagatgaggtttcaccatgttgaacaggctggtcttgaactcctgacctcaggtgatccacctgcctcggcctcccaaagggctgggattacaggcatgagccactgcccagcctgcagcagcttaattttacagtgtcccttttctccttctggaaactatatggggcaacaacaagactgaggaggaagaggaggaggaggaggaggaggaggaggaggaaaaagcccatcatcaatacacacatcaaactcaacttcagagaaattaggaagctgggaagccacgtaaacccaaaagcaggagacaccagcagaaccaacgcaggaagccagggaagtgcagaagaacagggcatggggggcaacccaggggggaatcttcactgttgccagcaacacacattcccagcaggagaggaccctcagagtgagaacgcagagctggagaaatgaagaaggagcaggtggtgcccggggaagtccaggggtgtgggatctgagagcacgccttcccaagagaggcgggaacacttgggaaggcagggctgagtccctggaggctgtatctgggaaaggaggctggcagtagaatcttcctgaagccgagtaggttctgagaggcagaggggcagtggtacagaggtgaggctgacgcttctgtgcaggaagggcaggctcctgaggaagggagccccgaatgctctccactagattcccagggagccccactccctccacagggacctcgcgctgacatctgggaaatgccattcatactggaacgtccgacacactgccatgaatgtgagggttttgtgactgatggggtaggtttctctcttccaacttaatagtataatgtccatttattcctcccccagcctccctgaacatgcacctcttagatagccacagtacggtgatcagaaccaggaaatccacattctcatatttaactatattaaaattatttcacaaaataaccaattttattaatttaattaaatacatttaactaatgtttaaatatatttaaataatttaactgatttaaaatgaacatattcgctaaacaaaagaccttattggagtttcaccactttttccactaatgtcctttttctgttcccaaattccacccaggatcacgctgcatttagttatttcttagtctctcgccgttttgtaggactgcaataacagttcctcaatctttccttatctttcataaccgtgacatcttgaaccagtactgatcagtatttatgaaatgttcctcgatttgggattgtctgatgtatttccatgattggactgaagttacgaacttttggcaattacagcacaaaaatgatgtggaatccttcccagtgcattccatcagagttatggcattgatagttcttcttactgatgatgttgaacttgttcatttggttcaggtttctgctgggtttctccattgtaaagatactatctttccccctcatagggggaaagatcttaggagaaatacttggagactatgaaaattttgtattttctcaaacgttaaaattttttttcaggccaggcgcagtggctcatgcctctaatcctagcactttgggatgccgatgtgggtggatcacctgaggtcaggagttcaaaaccagcttgatcaacatggagaaaccccatacctaccaaaaatacaaaattagccaggcatggtggtgcatgcctgtaatcccagctactcaggaggctgaggaaagagaattgcttgaacccgggaggagaggctgcagtgagctgagatcgtgccattgcactccagcctggataacaagagcaaaagtccatcacaaaaaaaaaaaaaaggccaggcgcaatggctcacacctgtaatcccagcactttgggaggccaaggtgggtggatcacctgaggtcaggagttggagaccagcctgaccaacatggagaaaccccatctctactaaaataaaatacaaaattaactgggcatggtggtgcatgcctgtaatcccagctactcaggaggctgaggcagtagaattgcttgaacacgggaggtggaggttgccgtgagccgagatcctgccattgcactccagcctggccaacaaaagcaaacctccatctcaaaaaaaaaaaacaacaacaaaacacctattttgacagccgggcatggtggctcacacctgtaatcccagaactttgggaggccaaggcaggcggatcacctgaagtcaggagttcaagaccagcctggcgaacatggtgaaaccccgtctctactaaacatacaaaaattagttgggcatggtggcatgtgcctgtaagttccagctacttgggaggctgaggcaggagaatcacttgaacccagaaggcagaggttgcagtgagccgagacggcgccattgcactccagcctgggcaatagagtgagggatctcaaaaaattataatgaaaaaataataattctattttgaattgtggtaaaatatacataaaatttactaccttaaccacttctaagtggcagttggaacaggggtcaaggagagcccttgggttgggtaatgtatattcacattgccatgcaaccaatctctggaactttttcatctgacaaaaccaaaactctatatccactaagcaacttcccattttctcccttccccatgtccctggcaacccccgttctaccttctgtttctattagtttgcttactcagtctggacgcttcacataagtgaaggaacaccgtatttgtctttttctaactggcttatttcacttagcgtaatgtcctcaatgttcatccatgttgtagcatgtgttagaatttccttcctttttaaggctgaagaacattttattgtatgtatataccacattttatcaattcatctgcctatggacaactaggctgcatccatcttttgacgagtgtgaataccactgctataaatatcagtgtacacatatttctatgagaccttgctttcaattattttggctatatacccagaagtgatattgccggatcatttggtaattctatttttaattttttgagaaactgcctgtcctgtgctgagcaggtctatataaacctacccgcaaaggccaaggaacctgagataccaaagaaagaggctgacaaatccagtttctcagaaagaaacatttaataggcgtttatgaacagaaggcaagtcagggatggcaccaagataagatggtggatccctgtgccatcacccccacccccccgacccagggcttctatagcataggggaagggtaatgcgggcttcagcagggatgtgtatggccagacacggtggctcacgcctgcaatcccagctctttgggaggccaaggtgggcggatcacctgaggtcaggagttccagaccagcctggccaacacggtaaaacctcgtctctactaaaaatacaaaaattagccaggcgtggtggcaggcgcctgtaatcccagttactcgggaagctgaggcaggagaatcgcttgagcccaggaggtgaagtttgcagtgagctgagattgtgccactgaagtccaacctgggagacagagtgagactcggtctcaaaaaataaaaaataaaaaataatttttttaaaaagataaaatagaaatcgtagatgaattgttggaactgggattaatcagaatatggcagattagcatccaagatggaattgctttattctcattcaaggtttccctcattcttcactctccccatgctggtcaccttgctgtttgttcctcaaacacatatgaaatgcgtttctgtcttggcagtcatcctgctacctgtaatgtcagcactgctttctgttgtcccttcagtcaggtcactgttcaaatagctctctagacaggctcttccttatcattctacttaaaatagcccccaatcactctgtgtccctttagcctgcttcctcttcctgctatttcatactacctgaaaaaatacttgaacttcctagaacataagctcataaaagcaagaactgtgctccacctctcctctcctctaccccagcactcagaagagaaacagagtcagcatccagtgagtgttcatgaatcaagtcactgcttggcagaattcagcactgggaccacagcctcgcctatcttcaactctttctccttctgcttttcctcctcccactctagtagccactcttctgggggcttgtcccttaaatgattagtccttactgacctattttctgtccactttatctgtttttgagagagggtctcactctgttgcccaggctggagtgcagtggcatgaatatgggtcactgcagcctccacctcctgggctcaagtgatcttcctgcctcagcctgccatgccatgtaactgaggccacaggcatgtgccaccatgtccagctaatttcttgatttttttttggtagaaatgggtctcactttattgcccagtctggtcttgaagtcctacactcgagcagtcctctcaacttggcctcccaaagtgctgggattacaggcatgagatactgcacctggtcttattttttcttttcttaagatacagggtctcaccatctggcccaggctgaactcaaactgctgagctcaagtaattcccccacctcagcctccgaagtagctaggactaaaggcatgaaaccaccatgcttggcttgtccaatttcattctacacactttcttggtatttaaacagctgctgttgctcttcattctgtagctctacatcagattcatgctctagtcctgtatatccaaatgatgactagaggctgccggctctgctctttcaaaggcacaatgagcgtagcccgtctacaaaactctcccttttccaatccagctttccctcctgcatcacctatctctctacatctggaaccatcggcagctgccttcataaggcacctcagtctggcattcggaaaaccaccctgtcttgccagagcctcttggtcttgggtagcaaaagctgtatgcaatctaaatcaagctttcaatcatgagaaatcacattccttcttttccctttgtaatatactcatgtgtttttttttttcctttctcaataagcaaattgtaccaccatcttattctgagatgctcctttttaaaagctgtagatcacattaatggaagtggttactgctgggaatattttccatgtgcaatgatctgtaaccctctttttcttttttttgagaccgagtcttgctctgttgcccaggccagagtgcagtggcacaatctctgctcactgcaagctttgcctcctgagttcatgccattatcctgcctcagcctcccaagtagctgggactacaggtgcccgccaccacgcccagctaatttttttttttgagatggagtctcgcttggtcgcccaggctggagtgcagtggtgcaatctcagctcattgcaagctccgcctcctgggttcacgccattctcctgcctcagcctcccgagtagctgggactacaggtgcccgccaccacacctggctaatttttttttttttttgtatttttagcagagatggggtttcaccatgttagccaggatggtcttgatctcctgacctcatgatccgcctgcctcggcctcccaaagtgctgggattacaggtgtgagccaccacgcctggccattcccagctaattttttgtattttttagtagagatggggtttcatgatgttagccaggatggtctcaatctcctgacctggtgatcagtccgcctaggcctcccaaagtgctaggattacaggtgtgagccactgcgcccagcctaactgtaaccctcttatctcaactagctgacattattacttcacatccagttcaatttataaattaagagaggtgccatgggcctggtacggtggctcacccccataatcccaacactttgggaggccgaggcaggtggatcacgaggtcaggagttcgagaccatcctggctaacatggtgaaaccacgtctctactaaaaatacaaaaaattagccaggtgtggtggcaggcacctgtagtcccagctacctgagaggctgaggcaggagaatggtgtgaatccaggaggcagagcttgcagtgagcagatatcatgccactgcactccagctggggcaacagagcaaaacatcgtccaaaaaaataaaaataaaaataaaaatgaaaaagaggtgccatgtgtacaaaaatcaatgcacatttatgaaattttttttcaaatatattttcacacattttatctaaatacataatacagaagcctgtgtgacttgggcaatgtggccaggagggcctgagactaacacatccaccttggcaaaaggacataaaatatgtcttatggtcagaaaaatcaacattttgtgtatttacttagtttacgaaaagtactgaaaatgctattactagctgaatttgtgatttccttttgaaattctgagttatccttatttttcccattttgtttttgcaccaaggagactgcagtcaaataaaacagatactacacgcactcgtcggggcagccgtactgcagaagcacgttgatgcactcctggctggaggcctgccgggcgtaggtcagcgctgtgttcccgtgggcatctcgggccatgacgtccaccccgtcaggagctgctccaggaccacattccccttgcggcaggccagatggagtgccgtgcagccgtctccctccccacaggtctcgttcacctcctcacgggagccatgtgccagcagcaggatggctgtctgcaggtcctcatcagtggtggcccgcagcagctgctggcccagggacagctcagtgcagggtagtggggccagaaagagcttctcctcatatttggaacggatccaccattccttctcttccctcgtggactttattgagggttttgtctgcccctggctgctcccttcccagatgctgttggctagctcattgccaatagatgacataaccttcctgagctcaactggccagtcatccagctccagagatcgcacacgggaaaggcgggtgccaaaactgcggtggatacctgagcattcaatacacatgaggactcccaagttcaaactggcccacttaggattctgggtctcacagtccacacagtgggcgttcccacgcatgttttggatcgactgcagggccatggcctcactctggctggtcagctgggacttgcttttactgctcttgcatgactgcaggctggccaggatctggctctggatggcttggacccaggcatcccgctcctcatacgtcgtggcttcaaagtgccacgtttggccagtggcagacacaatcataaagttgttggtgcttttcttctttaggtgtttctttttattggcatgaggagaggggggcgggttgagcttggggctggtggtgctggagataccggggctgaagcatatggagtcacccagcccggtgtccatgtccttggataggccattgcttttagagctggagatgggtgcacaggctgatgtggctagggatggccactttcctgggactttgatggtagatgtccgaaggtcaatctcttttttatgaatattcttcatataatcacctaagcttgaataataggtgagcacgccattggaacacagggtgacgtatttctttttccatgtcttcagccattttccacttcgctttaagagcatgccctgtttaatggggatggctctgccgctcccgatggtgtcagcatgattctccggggctttcctctctttgtctgggtcactccctttctcagatgtaaacaggttggaccagcgcatggacagcttgcaaacgggggtgggtgtgttggcagtgggaggaacactgaactgagggtcctcctggctggtgctgggagtcggtggaatggaggaggaatagttatttaaactcccacctccatttcttttcttcataatgtgcacggtggaaacctgtgtggaacaggaggaggaatggcttcaaaaattgggtagtggcttgcaggatcctatagacagctcacaattaccttttaaaaagatacattttctgggccaggcatggtggctcacacctgtaatcacagcactttgggaggccaaggtgggtggatcacgaggtcaggagttcaagaccatcctggccaacatggtgaaaccctgtctttacaaaaaaaaaaaaaagaaaaaaaaattagctgggcatggtggcacatgcctgtaattccagttactcgggaggctgaggcaggagaattgcttgaacagggacctgggaggcagagcctgcagtgagccaagatcgcgcgattgcactccagcctgggctacagaaagagagtccatcaaaaaaaaaaaaaaaaaaaaaaaaaaaaagatacattttctgttgtttggatagtatatttactcacactagctcactaactaaacagagctgcagatcagttcttactccagcacattctttttacaacacttaagatgactaaatgcaacatgaaatggggaagatttaaaaaaagatggctttgacttcagcatgaaacagatacaagtgtacgatgaaaatacaacctcaataaaagtgccacttaccgcaaatgagtgtaactgttcatcaggtatgctcaaagatctatctgcatctctataaaataagaaagtgcattacttcaaaaactgttaatatcttagtataatatttgttgagtaaaatacttcctcctgtgtgctttggtgtttactttaccaaagcagtttttacaaattcttctcctggatcctgacttgcagagggtttcctgacttcttctttctcagcacatcatggtctgtaccgtgaagccttttatatgataaccagtcagaaatgcccatgagtattgactctccctaacaggccatggcaataaaccaaacatattttcactcttctaaccacacattgaaacacaagaatgttctacaaagcagtagtagtaaactttaataaatgtaaatgtgattcagatttcctagcttcctttctctttagttctctgtagtatactctcatgatgtttttatgtattttctgttgtctgaatgacaaactcatctacctttttaagaggccagtctttgaggaactttaaactttgtaaaactaatgcattgtgcctgtgtataaaccagtggttctccaaatgtgctctgtggacctctcgggatcccgaagaccccttccagaaggcctaagaggtcataactgttctttttttttttttttttttttttttttgagaccaagttttactcttgttgcccaggctggagtgcaatggtgcgatctcggctcatggcaaccttcgcctcccaggttcaagtgattctcctaccccagcctcccaagtagcagggattacaggcacctgccaccactcctggctaagttttgtatttttagtagagatgtggtttcaccatgttggccaggctggtcttgaactcctaacctcaggcgatccacttgcctcggcctcccaaagtgctgggattacaggcctgagccactgtgcctggccaacactgttctgaatcatactaattaaacctgagaaagctgatgaaaaattttaaaaatttgtgaaagtaatacaaagtcattgcctgctttttcgttgacacttgccatgattgtataaaagcaaaagtaggtacaatggctggtttctcagcataaatcaaggcagtggtaccaattacattagtagtcattctattcttcactgtcccctacaggtaaaaaacatagcctgaatttcttaagaacgtctttgatgaagcaataaaaattaatgttgttaaatcttgacatgtctctaatattctgaataagtggaaagttaatgagaagtgctttttttttgtttttaaagaatccgtgatttaactgtgaactgaaaaatcacttttttcacagaacatcatttttatttaaaagtacaactgggccagcgcagtggctcacgcctgtaaaatcccagcactttgagaggccaaagcaggcagatggcctgagctccttcaggagttcgggaccagcctaggcaacataacgaaaccgtgtctctatcaaacatataagaaaattagcctggcgtggtgccacacatctgtggtcccagctacacaggagcctgaggtgagaggattgcttgagctgagatcatgccaatgcactccagccaagtgacagagtgaaactcggtctaaaaaaccagttcaactatcattctcaaaaataaatgaagtgagaggttgtcacttcaagggaaatacgtatttgttcccaatgataaaatttaagctttcctgtggactttgaaaaacttgttccttctactgtaggcttggcagcttttcaatacttaaaggcctgttaaagtaagattggtggttaaactaaaagtgatttttgacacaataaaacataaaccaatatattccaagtaactaatgcatgatattataaatgcaagtatggagcaaaagatccatttactgtgcaagaaagatcaatgagtactgatggaataaatttattaatatgtaaaatgccaccgtaactaatttaagaaaccaccacttgtgaagttttgatttagtgttttaacaaatacccacaactgtctgaaaactttaaaaatacaccttctaccaactacatatttgcatgaggttaggtcatcttattgcttctttttctctttttttgagacagagtctctctctgtcacccaggctggggtgcaatggcaagatctcggctcactgcaacctccacctcccaggctcaagtgattctcctgcctcagcctcccaagtaactgggactacaggcatgcaccaccacgcccagccattttttgtactttcagtagaggcgggttttaccatgttggtcgggctggtctcaaactcctgacctcaagtgatccacccaccttggcctcccaaaatgctgggattacaggtgtgaaccactgcgccccaccagcttattgctttttttgtttgtttgtttagacagagtcttgctctgtcacccaggctgcagtgcaatggcacgatctcagctctctgcaacctccgcctcccaagttcaagcggttctcctgcctcagcctccagaatacgtgggactacaggtgcgtgccaccatgcccagctaagtttttgtatttttagtagagacggggtttcgccgtgttagccaggatggtctcgatctcctgaccttgtgatccgcccgcctcagcctcccaaagtgctgggattacaggcgtgagccactgtgcccagcctcatattgcttctttgaagcaaattgcaaagaaagctctagagaatccatttgtctcctattaagctcaacatgagagactttaaataatataaacaaatgacacactttttactcaactttttgttgtagaaaagttttttttcaatgaaaaacttctgttaacaatactgttctcaaggaatattttctgtttttataaactgggtcatgggttactactgacatctagttggtagaggccatgaatactgctaaactctctgcaatgcacaagacagtcctcacaacaaagcattatctagcccataatatcaacagtggtaaggctgtgaaatctaaactaaaaatagattttgaaaaaatttcaattgtataattctaccacactaaatatcaatataatcaatataaacatatactctttgagattctcaatcatttaagaattatgagagtcttaaggaacaaagaaaatacaaataatttgcttcgatattttagtaggcacaatacagcttatgatgtctagagctgtgacctaacactgagcttgatatcttgcaaagtaattagctagaataacaagacaggtttctaaaaagctcacctttgtgtgatatgatgaggtatctccaaggtcacactgtggaaggaaaacaaattcataacaatagatgttatcatttgttaggcctgcagacattttttaaaaggggggcagaggaaactctcctagcggccctgaaattcaaatcttctagttcagaacagtaccataagggcactttgttttcatttctttgttttttacaaaaatatgagaaccaaaatgcaaggaaatatgccgttagaagacgcgtttctgttggtgattacaatatataaataataacagatttcccttttatatgcttttctaccgatgaaacctttcgtcccatgcgatttattttatgtatttatttattttttgacccagagtctgtctctcttgctcagactggactgcagtggtgccatcttgactcctcacaacctccaccacccaggttcaagcgattctcacgcctcagcctcccaagaagctgggactacaagtttgcgccactatgcccagataattttttttttgggggggtggtgggtggagtttcgctcttgttgcccaggctggagtgcaatggtgtgatctcggctcaccacaacctctgcctcccgggttcaagagattctcctgcctcagcctcccaagtggctgggattacaggcatgtaccaccacacccagctaattttgtagagtgaggctcaaaacaactgagggaaggtaaatctcaattctactaataggtctacacaatattagcactttttaaaaagcctgtaacattagcatgtgagatggatatgtctatagtgcttcaagtagttttcatctctgaaataattttaaaatcacagaatttaaagttacatgctggaaaggaccaatgaccttatgtgacatttaattcaacacttgttttacagatcagggaaacaaaccttaaaactgacttgcccaaggtcccaccaaataggagcagtttctcgtcctaaactcaaattaagcagtggctctcaaactttgctgcacattaaaatcgcctgagaagctttaatatctgcctcatcttccacatgagacattttaatttaattagtattgggtatggctttgggcatcaaggttcttggtaaacgtttcccaggtgatttcaatcagcagcaaagtttggaatgattgagctggggtgaaaatcagaatcttctgggatgcttttcttcacagaaagatgcctcacatccatcccgattttcctaaaaggcttctcagtgcctagagatagagggaaagtggagatgggaagatacatgtatttgcagacttgcattttgaaaaaaaccttgcataagtgatctcagcgagttccacctatcccactgacaacagtgcactactgattcatgataaaacatttttcaatatatcttcttgaagccaatttgccctattaatttgttcaataactttatttcaccaatagtgaatacaccaaatgattatttctcaaacttgctggtggcaaattaaaacttactatactctcaaaagtagacttctaaaaagtagaataatgaggaaaaaagcacaaaattagtttcagcaaaattaatcttcaaagctgcttttgaattatatgctaacttatcaaaatctttggaactcagaagaagccagggactctagtcaaagtaatttttgtgtatgtgtgctcaaagatttaagagacttggctgactacagacatttagtgattactcaataggtcccaaagctcaggacttgagacagagtttgagttcagtttttgtttgaaacacaatttcctctcaactattgttaaaagggagggaggaaagtgacattattatgagtgtaaacttgccacttttaattgaagtaaaagttattgacaattgaattagctaaaaaggctagtgcatttgaaacaaaattgtttataagctagttatgtttacagaatgaaaagttaaattaaagataaagacattaatattctaaattagcactttccaaactgtgttctaaaaatcaagactaataacccaaggagatgagaataatgtacactggacggcccctgtggagctggtggtggtgttggttgttgttccttttaaaataaacttcatctcagggtgctctcaaagcgcatctttgtggcccacgaggtgctcatgcacaatgggagaaattcaaatgcagatacactgtggtgccagaagaagaaaagctgttccttcttccaaggataatgtccaaagtagtgcacactgatttgggcctatgatgcattgaaaaactaagtttccacaaaaaacattcaataaagggaacctatccttctcactgtgttcaacattgtctaaaggcataaagacatcaaaaagacacactgtttctgggtttgcttctttgctaactgatttttccttccaccacgacgtctaagattaaaagagaaactgatacttaatattcagaatctgaatatcaatatatggttgactccaatttcttaagctgattgctgaagaggacaaccaaatggctgaaataatttccgaataaaggaatctgtccctcggcagcatagttgtactcacgatattattgtcattgtaagataatgctggatggctgtgctgtcatcaaggaatattgtcgaacacgagctgtattgttgactgaaacgctcagtagatacctgaaggggaagggaagtgtaagtcaaacttatcaaagtgtatttttttctcagttaaaatgtcaaatgacaaagcactaagatatgtcttacactccatgaactgcctgagtgtggtatcatgtgcaatctatagaaaacccattggaggctctcaacttccagagatgatgtttaagatatgggttataaaatgctgcccttaatatggtacctgtcatcaaacctaacaaggattttatgaattaccgttaaaaataatgggaaaagtcggcttcgccgggcgcggtggctcacacctgtaatcctagcactttgggaggtggaggcgggcagatcacgaggtcaagagatcgagaccatcctggctaacatggtgaaaccccgtctctactaaaaatacaaaaaattagccgggcgtggtagcaggcccctgtagtcccagctactcgagaggctgaaacaggagaatggggcgaacccaggaggcagagcttgcagtgagccgagttcgcgccactgcactccaggccgggagacaaagtgagactccgtctcaaaaaaaaaaaaaaaaaaagaaagaaaagtttaaaatgagatttcatatttttttctacagcaataaaaagcagccaagaatttctattaattaattaattaattaatttatttatttatttatttatttttgagacggagtctcgctctgtagcccaggctggagtgcagtggcgcgatctcggctcactgcaagctccgcctcccgggttcacgccattctcctgactcagcctcctgagtagctgggactacaggcgcccgccaccatgcccggctaactttttgtatttttagtagagacggggtttcaccgtgttagccaggatggtctcgatctcctcacctcgtgatctgcctgcctcagcctcccaaagtactgggattacaggcgtgagccacggcgcccagtccttctattatttatttactacgataaaatgtagtgtattaaataatcctgctacaagagcactttattgcagtgaatacaagactaatgcatttactaaattactaatcctaaacgtattatttcaggtgatattgttacaaaagaagtgtttcagattcaggggctctgtgtgccagggctgctaggccaccaacaagtgaggaagccataggtttctctagtcctattttcttatgtggaggataaaaagagtatcacttaaatattctctcacaccctaaaaacaaatgacaacttaaaaaatctaactttcacttcatgtttaaataagactgccaagacatgactcaaatgagactcttggagaatactttgcattcacttcaaaacttgatcaattgcattctataaatcatctgacctgcacctagccattttcctgctctacccctgctctctgcctagaatactgcttttctctttccttgcttcagcaagctcgactccatctaccctcttggatctctttgtcggcagccacaccaaaaaatgtatttttatacactaattagttgaattcaccactgcttacaagatgctaattcctgcagagtattcccctcatgagaaagtatgcctctccataagagtaagggagggcccttactcttcctacctccagctgctgagcatagaattttgagtaaatccaaaacttcgacaagtgtttgacaattcagtcatcatttggaaggtaagtcttactacatttaattacagcaaaaacactactaacagtttactctttataggtattatttaaggtagtcacaaaatagaaacaaataatctaacgtcagtcagcataaatgagagtatgaaattttacaatatttaacaagaaatggaaggggttacttagtagttttaaggtttaatgacaaaaactagaaaataatcgtacctagtaatttagtaagtcaaaaccaaagccttaccatcaaaggtgcagtacccattggatgcggatgcccacgcactgacttctgctgtacctgctgcctctcattttaacccattaaaaatactaaagttgttttccttgtagacatctttcacctccttggttaggtctattccgaagtactttattttattttagtttatttttgcagctatcagaaaaggggttgagttcttggtttgattctaagcttggtcgcttctggggtataacagagctactgatttgtgtacattaattttgtctcctgaaactttgctgaattcatttatcggttctaggagctttttggaggagtctttagggtttcctaggtatatgatcatatcatcatcaaacagcaacagtttgacttcctctttactgatctgcatgccttttattgttttctcttgtgtgattgctctggctaggccttccagtagtatgttgaatacaagtggtgagagtgggcatccttgtcttgttccagttctcggggggaatgctttcaacttttccccctttcagtattatgttgttgtgggtttgtcatagatggcttttattacattgagctatgacccttgtatgctgattttgctgagggttttaatcataaaaggatgctgcattttgtcaaatgctttttctgcatctgttaagatgatcatgtgattttttgtttttaattctgtttatgtggtgtatcacatttattgacttgtgtatgttaatccatccccgcatccctggtatgaaacccatttgatcatggtggattatcttttttttattttttgagatggagtcttgctctgttgcccaggctggagtatgcaatgcggtgatcttggctcactgcaacctctgcctccgaggttcaagcgattctcctgcctcagccacccgagtagatgggataacaggtgagcgccaccacgcccggctaacttttgtatttttagtagagatggggtttcaccatgttggccaggctggtctcgaactcctgacctcatgatccgtccgcctcagcctcccaaagtgctgggattacaggtgtgagccaccgtgcctggcccgattatctttttgatatgccgttgggaactacaaaacattgctgaatgaagtcatggacacagacaaatggaaagacacccatgctcatgaatgggtagaatgaatattgtgaaaatgaccatactgccaaaagcaatctacaaattcaatgcaactcccatcaaaataccaccatccttcttcacagaactagaaaaaacagtcttgaaatttatatggaccaaacaagaaccggcacagccaaaacaaaactaagcaaaaacaacaaatctggaggcatgacattacctgatttcaaactatactataaggccatagtcgccaaaatagcacggtactgatataaaaataggcacatacaccaatggaatagaatagagaacccagaaataaactcaaatacctatagccaactgattttcaacaaagccacctaaaacataaagtgaagaaagtaaaccctattcaacaaatggtgctgggataattggcaagccacatgcgggagaatgaaactggatcctcaactctcaccttacacaaaaatcaactcaagatggatcaaggacataaatctatgacctgaaaccataaaagttctagaagataacattggaaaaacccgtctagacactggcttgggcaaagacttcatgaccaagaacacaaaagcaaatgcaacagaaacaaataggtgagacttaactaaagagcttctgcacaggaaaaggaacaatcaacagagtatacagacaaccacagagtgggaggaaatcttcgcagtctatacatctgacaaagggctattatccagaatctatgaggaactcaaacaaattacaattacaaaaatatggaaccagcccaaatgcccatcagtcaatgagcggataaagaaactgtgatatacatacatattatatatatatatatgaggaataccacctcagccataataaggaataaattcatggcattcccagcaacctggatggaagtaagactattattctaagtgaaataactcagcatggaaaaccaaatatcatgttctctttcctacgtgggagctaagctatgaggatgcaaagccataagaatgatacaatggactttggggacttgggggaaaggctgggaggagggtgagggataaaagactacaaattgggttcagcggatactgctcaggtgatgggtgcacctaaatctcacaaatcatcactaaagaacttagtcatgtcaccaaatgccacctgttcccccagaaacctatggaaataataaataaataaataaagtacagcatttttctcagcaaacataaaataaaacaaagactaaagttcatatttttcactctccttttgggcaggacaaattttagataggtttttaaagaattagtaacttttttcctttttccgagacagggtctccctttgttgcccaggctggagtgcagtggtgcaattatagttaactgcagcctcaaactcctgagctcaggtgatcctctgcctcagcctcctgagtaggtaatatgaaaggcgcatgccacgaggcctggctaatttgttatttaacctttttgtagacatgaggtcttgctatgttgaccaggctaaaaatgaacaaatcttaattaacttaaatatttctaacaccttgggcattcaggaaaacagctccatttatgttgtgaagtaatgggaagcatatggcagtggataaactttgaatgaaaatattaaacaaggccttaggagaaaagtgtaatatgcttattatagatacattaatttaaaaaattctctggcttaatatcattatactcaaattagactttgatttaaacataggtcctaaatttggattaaatataatagattgaccacaaatttatttcgtctccctctggaagcctcattagtcataaaataaaggttacacccatgaccagcacagaaggttgacagagataatttttagtaaatgctgagacataaaaagtagacaaaggagtggtaaataacacagaaacacaactttgctgactacagaaagtgactggaacagaagcgagccagtttgtcttgcagaactaaaggcaggttgtgaacttacaggcaaatggcactttggaaagtagggtaaaatgtaaaaaaaaaaagccagcaaggtcagttgcaaatctctaactagagcccaaagtctacctgtccttccatctgacaagaaacttagatgtgtgttctctggatatatcaaacctgagaatttctggctcagagatactatggcttaaacctgagatataaagaaaactgtacaccaaaaatggaactccaactttctttgctaactctgcttttcctttccaggcctgcttttactttccaggcagaaaattgggagatccttctcagaagaaactgaaatgtcttcagtaaagatccccagataatacactgaggtctcccaaatgaaaagctagtcaggcttctaaggcctcacactgagtgctatcagttaacagaaatcctgcttccaaataaagcaggccagggaccaccacacattggagggaagcctccaagaaaagagatcaaaacaatagaaaaaaggaattgataggaccagtcaaaatcaggagcaaaactttaaaaaaaaaatcttaaaacactctcaaaaaatataaaattcaatagaaatagtagaggataaagtcacagaatatcccagaactagaataaaaagacaaactgaaaaaaatagaaggggaaaaattaaaaatcaatgcaggtgtactggtctaagcagcctagcatctgaagaacaagactatcagtaaaaaagtaacagagaaaataaaaaaaaaattctcaagaagagatagtctgcaggtttagtagcctcaataaaatgaaaagatccccaacaagctgttataaaatttcagaaccttagagagagagattctaaaaagcttccgcagataactaaaacctggttgtaaataacatatcacacactggcaatagattcaagaacaacactgtaataagagcacaactgcaaaatgtcttcagaaccatacaatttagattcaacctagaggtgtactctctatcaaagaggagggattttaacatctccacccaggaaaatgtgttcaagtacaactagagacgataacaggacagaaggaaacacagaatctaggactcaggagatcccacacaagacagcagttacgtgagatcccaaaagactttaaggagttagcccagaaaagcagacattgagcatatctagggaaacccacgctatattgaactaggatgacaaaaggccaaagaaagttgccccccacacacacataaaaaggaacagatgtgtttttgcagatggaaaatatctttgaaaggcatgtgataaatgctacaatacttgggggaaaaacagctattagaaaataggcaaatgaatatagtcagaaaattagcttcatgctaaaaaataatggatgtgaaagcaaacagagcacccagaggctacttaatgatatttggatagataaactaacataggctaggaaaaaagaagatccaggagaattgcagaagtgctcagatttcagaactgtttcagagacaggatgaaggacatggaatgcagaggcacagtgaaaacaccatatgacttagcagtgaataatatttgcagagtcataatcatgtaaatattactgatttaattaaaaagtgtgctacaattggaagaaacacagggagaaacataagatcatggtgtagcgaggaagatacgcttttacccgctgtgatagaaagtcaatagacagtgctggcaattaacttaactattctatttttgttctttcattaaaaataagattaaatatttaaggcacttttttttttttttttttttttgagacagagtttcgctctgtcgcccaggctggagtgcaatggcacgatcttggctcactgcaacctccgcctcctgggttcaagtgattcttctgcctcagcctcctgactagctgagattacaggcatgcaccagcacgcccggctacttttgtatttttagtagatacagaatttcaccatgttggtcagggttgtctcaaactcctgacctcagatgatcagcctgccttggcctcctaaagtgctgtgattacagacgttagccaccatgcccagccttaaggcagatcttttgaaccagactattgaaatttaacttaaatgtcagaaatctttaaaaggtggacacgctaagctaaacacttttctggataaatttaatactcaggaaaatagaagagatttagaaaatccacaaaaagaggtccatgctaccaccaccaggtccacattgtaatttaaagaaatcaagagagacatccttttatgtcaaactatcaatttcttaactatttgagtgtttacttacatggtttgtacagttgcttcttcttatttctacaactaagaataaaaaaaaaaaaaactggtcacttctgatacaaataccataaaataaaagtagttgttaacatcttactgattactcctatgtaaaatgagacaaaattccatttaaaaaaataattttcaataatttataatttaaattatctggcatgattaatttcataagtcaaatctaaaaacttagtttttcatttagtttactttttgtttctattacatacaaatgaaagaatcctcatgtacaaaagaaaagggtaaaaaaattaggccagatgaaaaatttagctaataaaaagtttaactgttgcatatatgagccatgatccattagtattctctcattctgcatttacacatagcttactttaattatcagactctaagagctaacagctctaagaactacgtcctgaccagacacctatctctagatgcaacagaatccctgtaagcatcttgaaccacacttagtggttatctactaatatgtcactaaaaacaaatcaaaattaaaaaacggtctttacacaactggaaagtaacgtatcttaatttttttttttttgagatggagtctcactctgtcacctaggctcgagtgcagtggtgggatctcagctcactgcaacctctacctcccaggttcaaccaattcttcagccttagcctcctgactagctgggactacaggcacgtgccaccatgcctagctaatttttttttgtatttttagtagagacagagttacactgtgttagccaggatggtcttgatctcctaacctcgtgatccacccacctcagcctcccaaagagctgggattacaggtgtaagccacagagcctggcctaaattttgatgttaaaatgagtatacaaacctaattggacatggtgtctgaagctcaaaaaatcattttttttcctctaaaaagaggccagaataataaaagccccaagagggacttgggccatgctttgtttcctacactgcctctgcctttgatgctggaagggccttgtaggcaaaagttcctaccaccgaagagtgagggacatggaatagcttttcttttactgcttccatgctctctaggtgtgagaagcccatggctctggaaggaactgggaaatacaattctgatatgttttggatatgttgcccctccaagtctcatgttaacatgtgacccttaatgttggagacagggcctagtgggaggcatttgggtaatggcagtggattccttatgaatggcttggtcccatccccatggtaataagcaaattctcattatggtaatttaaaaggctgtggtactggccaggtgcggtggctgaagcctgtaatcccagcactttgggaggctgaagcgggtagatcacttgaggtcaggagtttcagaccagcctggctaacatggtgaaaccctgtctctaccaaaaatacagaaattagccaggtgttatggtgcccacctatagtcccaactactcgggaggctgaggcaggagaattgcttgaacctgggagatggaggttgtagtgagccaagattgtgccattgcactccagtctgggcaacagagtgagactccatttcaaaaaaaaaaaaaaaaaagagtgtggtaccttcccccttcccctctctctttcaccgtgtggaaccacctgcttcccctttgccttttatcatgattgtaagtttgctgaggccctcaccagaagcagatgttaaagccatgtttgtacagcctgaaaatctttgagccaattaaacctcttttttgttataaattacccagccttaggtatctctttatagtaatgtaaaaaatgaagacaaattctaaccagaaataactgactcaagatgggcaaagtctactcaaactataaaaacaaaggttacaaactcccgtgttttactgtgctgcattacttcgcacactattatagaaccctcacttgtattcttgctgtttaagtcaactggaaaacttggctgtgtatggcttgttggcaaataaatgaggatttaacataacattagggaaataagcaggagtagggcatgtttaaatttacatgacatcaaatgaaaaagttaataacctaaaacttttgagtagcatgaacttggatgtggtaaatgaatgtggtcagaggactgtgtaagaggaggcccaaatcacagattcaatccctgatgataaacaactatgttttttaatttgtttaaatgaaaaccaagctgaagcctaagttctatcattcatctttaaagtgtactttttggagcaagggaaaagggattataaataaagataaatccattaattataaataaagataaatccaagaattataaagagaaatccatgactcctccaacacatgacaaattaattgtgttgataaaaagatggcaaaatgtataaacaaaaaggttacacgttttcactaacatcataacaactaaaggaaagtatatcacatattaaaataagacaagtgaacatgtgaaaaggtgaaaaatttaaaccaatatgagtttttctaaatactttctataacctgatcaaacaagagcttttattctttctcttggcggaaaaaacaatgttgtctcaccatctgtttgagagttcctctggaatattgtgcttgcctctggattggcagaagagttaaactccaaagctatatgcatagaggaagaaaagaaaaagagatgcaatcattgataaaaatttatcaactcgtttattcggctgctgcatttaggctatttcactatctctactttgattcttatccattgaaatgaatgtatagacataagatagagccaggcaagatggcacatgcttgtagtcccagctactcaggaggctgagatgggaaaatcacttgaacccaggtcaggaagttgaggccagcatgagtaacacaatgacaccctcctttatttaaaaaaaaaaaaaaaaaaaaaaagaagaagaggtaaattttggctttgagttgtgtaaaatcaactttgcataaaataaatcaagatggcagtaagttttaaaagacagtctattttataggcaaaatataagatgtattctagagtttttaaaatttttaaaaagtaaattcatcatatctgtcacttccatttcattctgaggacacagaaccttagttctcttgagtagctgtcttccatagtcatgtgatatctctaagttttcatttcttcattagcaatacatagggagaacatacacaggccttatttgtattggaaagggccaagtgagacatacataaactgtgttgtaatcctaaagaatgacaataaagagccatttttgggctctcatccaacactacccatctactaactggtgtgtaacatccatcaggctttccaaacatcaccaagcagagtataagtttatacaagtacttacatgctttgtgtataaaggtacaatcaattaattcacacaatgcatttgtttattctaaagcaatccttaaatatcttgaaatgtgaagatagtacttccaagttacaaagtcacactcataatgagtcttaattatcctacctctttaaaaattaagagcccaaccaaagtttaaatagaagagctataagacatttcctctagagtaatgaaatctctggcatttaaatgaaaccaataagccaactggatttaatatgtttatgatgcaatgttttctattttgaaaatttcagtttttattcaagaaccatattattacccagaattacttttacttagattcatctctttgcaaaattttagaggcaaaccaactaattgttttctgttttctaccggctcccatcccctgcctctgccaacagtgtagagactaaaaaactccaactctttccttttttttttgtgagacggagtctcgctctgtcacccagcctggagtgcattggcgtgatctctgctcactgcaacctccacctcccaggtccaagcaattctcccgcctcagccttgtgagtagctggaactacagtcatgcgccactacgcccagctaatttttgtattttcttttttagtagagacagcgtttcaccatgttggccaggctggtctcgaactcctgacctcaggtgatccgcctgccacagcctcccaaagtgctgggattacaggcgtgagccaccaagcccagccaaaactgtaactttcttatctttgaacaagatgctattgtcaggaggggaagggacaaagggggagccacggcaacaaacactcttacagggaagtctgacattttaacctgcaatctttatattacacattaaaagtctacgttgacgtttcatgtcttttgaaagttttgaccgtgaaccaatccccacctctcttttagaacaaggaggtaaataaagtctgttaagtcaccagaataaatctggagacacattttctgttaaagtaagaattttaaagtaatcagagcctcataggtaaactcctttgagaaaccccaaacacacacacacaaccatttttctgcagccccggctgtgacattttatacctttcacaattattttaagcactctccttttttctttttccttctgtgttcaaattacagttagaagaaactaagcagcttctatcaaggtgacttaaagcagcccattaagaataccatatagcctctcccgtggcaacctccattctgattttaaataagaaatccccaaatatttgaataggaactgtcctgagatttggctactttaacaaaggaaacaattaggcacttacctggttccttcacttaggtaccatctggataggttcaaagaaaaattaagatgggtactgaaaagttgggatatttgagtttttattgagaaaaggaagagaatagctcaaagaagcctaaacaaagtcccacaggataataaacagagctacagacactgttgtctcaccatctgtttgagagttcctctggaatattgtgcttgcctctggattggcagaaaggttaaactccaaagctatatgtatagagggagaaaagaaaaaggacgtaatcatttataaaaatttatcaactcatttattcaactgctgcttattcgacaagagccataaataaatggtcccatgccagcctgggagaatgagatgagagagcaagaactgggcgattgggaggggaggtgaaaagaaactgactggactcggtggggaaagactaaggggtgggaattcaaggcagagccagcttttgttcctggccagcccccgggaaagctggctacaagcagaaaggagctcgaagtgtgggatgcctcaaagggaaccttggggacagcagcagccagaggcaaaccgagggtagatggcacctatcacctccttaccttcaggcatctcccggtcacgaacctggtgcatgtggaggtcctcaccaacttcaacagtcacctcagcaggctgtacagcagcagccatgggcgctcctgccatcctgtcctcagctcctgcctcatagatctcagattcagagggacacaccgacccctgctgctggtcaaactcgaggctgacgctagggtgcacacgacaggtcagtatgttccccatggggcgcctctactgtctgccaccacctgtgcctctgctcacagctttggccacgcactcccgctgtcctaggccgaggctatgctgcacttgcagagatggtcttcccgctcctcgcctgcccacctcacagtgcggccccgggcaccagccctggccccggccccggccccggccccggctagggctgcgggccaaggcccgcaccctgctgcctcccctgagttgacttgtctgggagggtgaagaccagccggcttatttaataggttgtgaacccaacaagcgctgagagacacaacaactgcctgaagagagaacagacggagctcctcctccttctgtagtcacctacagactgaagcccactggccccaggtgggagcccaggcatgtggcacacaatgccccaccccacacttcacaatgccctccccgacacctcacagtgccccaccctgcctgccacccctccccaacagctcagaatgcccctgccttggctgccccaccctgtggcttatgatgctgctgctctcctggcccctcgtgcagtgccaatgggactaaggttttcattcatcaccagcttcctgagattttagtcctaagaaaagcacagggtagttcattcctcgaagccagcttcctctacgagttctacacaaagcctcagtagagtgggtcccattagcaaccaagttgaacaacttttatttgctgtctgaatatagatacacctgaattgttgactgcttttgtaactaaacactcctctcctgtcttccaacgagtggtcatttttgtccgcaacttgatcacagcaatccctggggccctagctctactctcaataaagagttatggctgtgtgttttgaatgacaccttaggacccatcctgcctccacctccttctccataaaatagaaacctaacttgtccctccaagctctgaaatgctgaaacttaccaactcccttttctccccgctatttcttccttccatggcagggactttcagattttctttcttttactaacaaggcactaaacatgattttctcatacaaaatcgagagccataaagtggcttaccacagtcctatttcaataaagatgaatactcgacatctggcaagtagtgtgtgcctgacagtgtccccactgtgctatgctcatttaaccctcagaaacaatctcatgttacagattttacagaagttgttgggacagagaaggtaagtaaacccccccaaggtcacatgactgctaagggtggggccatagtttgatcccaggtagtctgaattccccaattgcttaagcatgattatcagaaagtatagcagtctgttttcacactgatataaagaaacacctgaggttgggtaatttttaaaggaaagaggcttaattgactcagtttcacatggctggggaggcctcaggaaacttacaatcatggcagagggggaagtccttcaggaaacttacaatcatggcagaagggcaggtccgacttacatggtggccgcacagagagtgggaacatgtgaaggagcaactgtcaaacatgtataaaaccatcagatctcagctgggcacggtggctcacacttgtaaccctagtactttgggaggccaaggcaggtggatcaactgaggtcaggagtttgagaccagcctagctaatgtagtgaaatcctgtctctactaaaaatacaaaaattagctgggtgtggttgtgcatgcctgtaatcccagctactcaggaggctgaggcaggagaatcactggaactcaagaggcagagactgcagtgagccaagatcgtgccatggcactcctgcctggacaacagagcaggactccatcccaagaaacaaaacaaaacaaaaccctataagatctcatgaggacttactgaatatcacaagaacagcatgaggataactgcccctgtgatccaatcacctccccctaggcccctccctcgacacatcgggattatggggattataattcatgatgatatttgggtggggacatggcaaaaccatatcagaaagtaaaggtagaagtcaagcttggatgggaaatgacattgtagattattattattattattattttgagacgaagttttgctcttgttgcccagtgaaattgtttctctaatttcattttcagattgtgtcttgtagatgtatagaaatacaattgataaatgattctggctattaaccttttatgcttcaaccttgctgaacactatttttttttttttttttttgagacggagtttcgttcttgttgcccaggctggactgcaatggcgtgatcttggctcactgcaacctccgcctcccgggctcaagcgattctcctgcctcagcctcccgagtagctgggattgcaggcatgcgtcaccatgcccagctaattttgtatttttagtagagacggggtttctccatgttgatcaggcccacctcagcctcccaaagtgctaggactacaggaatgagccatcgtgcccagccagattcgtatatttttaaaagaattttttttactttttattttttttttttttgagacagagtctcactctgttgcccaggtagtggcacaatcattgctcactgcaacctccacctcctgggtccaagtgattctcattcaagtgcctaagcctcccaagtagctgggattacaggatcccgcccccatgctcagctaatgtttgtatttttagtagagatggggtttcaccatgttgctcaggttgatctcgaactcctgacctcaggtgatccacctgccttggcctcccaaagtgctgggattgcaggcgtgagccaccactcccaaacagaacaacatttttttgatgtggattttaaaatgcctccccttctttcaacattaagtcccttctacatgccaggcactgtatgtgtgaaatagtcccaactctcaatgagtttaggcagatacacaaacaaaggcttaaggaggtcagttttctgagaccatactgctggacagtatatgaacctgggatacaaacccacctctatttgacctcaaatttgatgctggggtggttttaattttattctgggaatttcagtcattcaaccataaaaaggtgaaaagtctctgtcagatgtgcgtgtagtggtctgtataataaagactgaaggaagcaaccaaaccaattaagagactttctctaaaggcagagtaatgctaagggcagtggcagtgacaaaagtggaggaaaaagtctgtgatcatttgggagacagaataggaagtgcttggtcatgagatgtgaaagaagaggggaagtagaaggaaaacagagctgctcaggctctgctggggaagactgggtatgtagcagtgccttcctcctggccgagaatgtaggaagagaaataggtaaggaggaaaagatagttttttactctcagtgtcacattaaaatggaactctctggtcaaaagttgaatataaatctctgtaggctaagtccatttgtgacatcccaacatatgttttcaaaaataacatacacactaaatcaagccattaagcgtaactggggaaatttcctaaaatttacatgctaaaaaatcaccatttttcatttattactttcatggagcaactttgaatctatggttacagcaggtgaggcaccttgtataaaataaagctaatacatgaaataaaaccatttaaaattctattgttctcagagaatggagaaagcaattgaagccatgggtgtggaggtgactgccttgagaagttgtgtatagtaaggagaactgggaagaaagaagacctggagaatagggtgatttgcacggcattaagtgaagcttgaaaaagtgagcactgggagtcaagagacatgtatgaatcaggaatggctgctcctgtgagttgttagaaaggagatgatgccttcttttcatatctataacagtagcacctagcacagtgcctgttcaataggtactcgacatgtattatcccaatgcagagtcaaattttgccaggaaggcaggaaagctacaaattagctatggcaacttagtgattgggcttgtgtgtgtgtgtgagtgagctggatgtcaggcagtgggcaaagtagtgaactggaggtgagaaaacaatgacacaaactcagggcttctcttcccaagtatttggctgagaagagagatgtagtattaaagggagatatgtggtaaaggaagacttttatttcaagattcaacaaaagcgtgagtatacttctatgttaaagggaaagagccaatagaaaaaacacatttttgaggttagaagagaaggaagaactaatgcagaagggccccaaaaggcacaggtgcgtgcaatccggatcagggacagattagctttggattcctacaaaagcaagaagggagaaaggaccatgtgacactagagctatttctggtaaaggaaaggtttgggaaaagatcttttgatcacctttattttaacagaatgtttttttttttttttgagatggagtcttgctctgtcacccaggctggagtgcagtggcacgatctcggctcactgcaacctctgcctcctgggttcatgccattctcctgcctcagcctcctgattagctgggactacaggcacccgttaccatgtccagctaattttttgtatttttagtaaagatggggtttcaacgtgttagccaggatggtctccatctcttgacttcgtgatccgcctgtctcggcctcccaaagtctgggattacaggcgtgagccactgcacccggctagacttaaaaaaaaaaaaaaaaatactgtgggaaaaaggatattatgtatagaaaagtctacacttcttgatacaactaactaaaaaaagcctgatacactaaacaaaacccaaataatgtcttccctaaaagtgggtaacttgaaaagcaattcgagcaaaaatcaaggagttcaattataaataagtatatcaacaaagtgaaagatgggtttaatttttcccacaaaaagttaaaagaaataacagcagttttagaggaagaggaaaaaataataagaaaattacatgcagttgcaaaatgtgtgactatttacaaactctaacatataactacaaaacggaccagaagaatcattatcataggaagcaaagggtcatttcaaaaatcagaggagggatgattcatatttaatttaattctgtggaaaaaatttaagtaacctttgaggacaaaaataggtgatatgttgaaatgcgggaaaccacagtggaaggaaaaagaattcaagaaagctcagtttcagtaaccagtatctagtaaaatcttcaggacctagaggctacaatctgcattaatagtgtctgaagacctagaaatgtcattaaataccattttggataattcttgtagacttgagatgatgtctatttaaagttacaaaatagtgcccgtatttctgtattcattacagacaacaattggatatggaaaagaaactaacatgctatgccacaatctctaaagaaagattagggatgtttcagcttaaagcaagaataatcacaataaagttttacgaccctttgcaagcatatatgaaaaacttacaaaaagtttgtaatgatcttttcttaagctaagagaatggaaaaaatgagaaaaattaaattataaaatgaaactttggtttagaggtaagaaacatttgatgacagtcaagagatcagggttgtacagtgtattatgtgaatgttgtgactcattggtttcatcttggatatcataacttgacattttgtaaaagtgatttttcatgggagttttttcaggtgccctgaaaagtcctgtcccatgagaagcgaataatagtcttccatattcttgcgatatcttaatgaatagcatcttctacagtcttccattgtttagtccttggagagacactgactgaagctgtgaggtttcacaatgacatgtcagccaaatacatatgctcagatttaccatttatcaagaggtcttcacactatcaattgtgcaattatcattctacacacaggcagtgataaagggagtaaaaaaccacagccatggatcgggagaccaaggtacctccagaggagtccagtgggtccagaagccctttggatgttggtcagaggctcctcttgggcagagatcacagcagcagccaacaggtctggtgaaatccttaagagttctcatggacaaagcttgtgaaggcatcttagacaagatcttgtctttgctggttttatgatcctctgcagatgggtctattctcattatctcagccacctttcacttcctatcagttcagttcaggtctctcatgatcccaggcagcagtagttgttatcacgtgagttcattcatatatgtttatctctttggggatggggggacaacttcactgtggacttaattctactggagatgagtgaccccattttaagacaacaggatcacaaattattatcacatatcagcagggcagacaatagctacgacctggggctgaaagcaggtaactccatttatcctgtaaacattgtcttgattatggtgccagttgctgtgagggatttcctttccaccacctgtttttcacaaggtttgagtctgaactgctaacattctactgatttctgggtgaagggactgactgcaccatcctaccctgtcagagcacttgccccagtacttccactttaagagttttccaccttgtccagaactacagtccattaatcccctcattttctctcttaagagaataaacaggccaggcgcggtggctcacgcctgtaatcccagcactttgggaggctgaggcgggtggatcatctgaggtcaggagttcgagaccagcttcgcctacatagtgaaatctcgtctccactaaaaaaaaaatcacaaaaattagccgggcgtggtggcaggcgcctgtaatcccagctactcgggaggctgaggcaggagaatcccttgaacccgggaggcagaggttgcagtgagccaagactgtgccacagcactccagcctgggtgacagagtgagactccctctcaaaaaaaaaaaaagaaaaaagagagaaaataaacaacacatctcaagtacacacccacatccctcttatcccaaataccaaacacacaaaaatccaatctgtctccttctacctaagcaattttagatagtcactgtctcataattaccttaagctccctgacttgctgctcatcctttctctggcaaaatctcatccttggatgagcccgactttgtgtttgctcaatgacaccactcacctgaaccagaaaaaatatcaaaaagtggtcagagatatcatcataaattcaaattacttacacaaaaaattggccctaaatgtttccagaaatcaataaaagttttgtttctccaatgacatcatttcttcagaaacccaatgtgtataacctattttttctatgttcttctaacatttattcaacttctctcatctgatatcttgccaaatcattcaaagagaaaatatatcccattaggcaagagcccaccatattcccatcacctgagaaaatcatatgcacaggatgcacccacctcacctttctctgcctcatcatgtcagaaaaagtaccccaccttttgtcacaaggcaaacctgagataaaagatttagatggcctgtaattccagcacttggggagaccaatgcaggcagattatttgagtctaagagttcaaaagaagcctaagcaacttagggaaactgcatctctcaaacaaatacaaaccattagcctagcatggtggtgtggtggcacatgcctgtagtcccagctactcagggtggggagcactgaggtgggaggatcacctgagctggaaggttgtggctgcagtgagccgtgatcacgtcactgcactccagccacggtaacagatatttttaaaaggatcttctctgttaaaaataatcaaataaacaggtggccatgaggctgaggtggctgccgtgcactcaattcctccttaaataaaccaaaacttgactcagtgtaaataataaaaggaaatgtaagaaccaatcagaaaccaccaactaacatctaactagagaccttccactgtaatgttccaaatgaggccactgctccacttcacccaatcaagtattttctttttcttccacattcaccatataaaattcttcccccaccctccctaagcctctctgtgggacctctgagctgcttgcagtctggggctgcctagtttatacatttctgaatgctcaagtatattttctaatgtttcaaagtggctctggtgtaggaggttgttggtggagtgacccgagagtatacaggaattgagggcatatgagatctctggactctgcactccattttgctgtacactcaaaactactctaaaataataatatatctttaaaaatctataactagcacgtagcccttttcaagcctccaactggttggagccagttcgattaaagctcagaagaaaaactggttaataagctagttctgacccaactggcaagaagcggcaggaaagacccaggccaggggagcatattgcacatgcatgcaccaggaaactggaggaagcttggaggccctttagcctggtcctgagcccgctgaaactgcagttacagcacagatgcctggggcaccaatctgaatctgccaacatccaaggccacatgaacacaaatgcgcagtctcctctgcgatcggtagctaaggatgttaggccatgattggactaggatgggagatgaactgagaactatggattctgtaggttgttgttgtctcttcccaccccaagcaacaagtgatgaacacacacacacacacacacacacacacacacacacacacacacacatcccgtagtgactaacaggatctccctccaggggatttgcagaaaggggagcagaaaacatcccaggggcctttcacagctacttccttgagccccctttcagactgctgtctagacctgtcgcagcccaaacatcaccaccctgatatgcagaagctggcatccttacctgaaattcaacaccaagaaatgatctcttctactcaacactgatagaaatacctctaagcaatgtcctcattggcaggggtggagtgggggagtttcttaaaaagtgaggcctctgcctaccacctagagaacctggaaatttccatctgtgccacaaagtccaaatcactggccactgccccagtgtatggcagattagaacatctctccattagatctgggtttctattccattgagtgaaatggcttttctattacaggaacagaataagggatcaaaagggtcttacaactgaactccagtgtacagtctgcacagacactaggcttgtgcaaatatgacacagcgaggccccaggacccttaagccagctgaatgtactgagtttcaggaaacagtgagatacgttcagcaaaacagtgggcttcatgctgaaagaagtcattccaagtaaacacacatcacacacacacacacacacacacacacacacacacacacccccgcagacaccctagtggccaataggtcctctcaccaaaaacctgtgatcaggagagcagaaagcctcccaggggtccatcactgccctttctggagccccttatcagatggccagccccaggacagcactgtctgatcctggtccagtccaaaccaccatcaccctgtgatgtgggagctggccacttcaccagaacctctgtgtcagaaaaatttctcttccttttaaaatgatgagggggaaccttcagacagtgtctgattagggtgggtggagagaggggtttcctagaaagtcaggcagggcagggctgaagccctctgggttaactgagtgcttttgatatgaaggcaggtaagactggacaggtgggggtgttagtgaggggatggtgtagggtgtgctgaagaactccacttgggctctccacaccagggaaaatgaccataaaacatcccatcttcactgctcagagaaggctagatctgctgtgagctagaaagccatgtgggggcagctgatgagtcatcaaatgggagaaatctgagagccatgtgttccacaggcctctggtccttgttcaggcagcagggcactgtgacatgtggctccttggccccttccagccaccaccttgattgcatgctgcagggaaagagactgaagaccaagaatggggtcttgctcaccatgggatgatggctcagtacagagctgagctatgtatggcccaagaggcagaatgtggggatgacccaggctgagctgggggatccaactgaacatgcacttgctaagaagctgtgggctatgatgccttgggaccccagtctgggtctagaattgtagcaaaacaggctactggtaaaagttcttgagaagccaactcacttttgctgtcatccatgggcaaacaaaccaagccccaccacttcccactccctctgaaagcctcctgcccctctgatcgaccacaccacaatggtgtcactctgtaaggcacaggtagacaaggcatccagccatgaacactccagggcgcacacatgtccagaatacgctggttcttgttgagactccactcttccaactcagacagaagctccccaatctcctcagccactcccaacaactggaggtctgaaaactttcatgcatgccgctatggtctaaaccactcgtggcggttttcattttcattttcctgataatcagtgatgctgagcacctttccatatgccttttcaccaactggatgccttctatggctaaatgtctattcgaatccattgcccatttacaaatctgcttttttgtgggcttcttgatgtttttctctttttttttcctatttatttatacaagttccttaggtattttggatattttttaaaatcattttcaattccactgcccagttataatttttttttttttttttttgagacggagttttgctgttattgcccaggctagagtgcaatggtgcgatcttggctcacagcaacctccacctcccagagtcaagcaattctcctgcctcagcctcctgagtagctgggattacaggcatgtgccaccatgcccagctaatttttgtatttttagtagagatgggttttttccatgttggtcaggctggtctcaaactcccggtctcaggtgatccatccacctcggcctcccaaagtgctgggattacaggcgtgagccactgtgcccggccaattatccctttttgtgtttttttggggggttgggggaagaacagagtctcactctgtcatctaggctggagtgcactggtatgatctcggctcactgcagcctccgcctcccaggttccagcgattctccggactcagtctcccgggtagctaagatcatgggcgcgcaacacatgcccagctaacttttgtatttttagtagagacagggtttcaccatgttggccaggctgttctcaaactcctgacctcaggtgatccgcccacctcggtctcccaaagtgttgggattacaggcgggagccaccactcccgaacccattttgtgttttaacatcagtcaacactcctattttaaaataataacaatgaatggcggtaccttagaacaaaggaattatagatctttctcttgtcttagtgcagacattttgtctataaaatgttattcacagatgaactcatgagaacattactgtgaattttaaatccatatacaagtgtatgctcattcatgaatatttcaataaaataaaactaatagcaaaaaagaattccagagttgaagcagtttcaggaaaaaggagttggcagtatgaagtaaaatagcaaaaaaaattttttttttaaatgggtatatttgtgtctacaacttttttttaattatagcattagacaatgtgtatatagatacgtatataaagcaatggaagtggcattgttttcatactagtctagaatattaaaaaatatgtaatatgtgatcagcaaaataatggccccccaaagatgtccacagattcctagaaccttacatgaaaacggtacatcatgcatgtgattcaggtaaagaccttgacatgaggagactaccctggtgctatggaatgaacgttgtgttccgtcactgttcatgtgttaaaatcctaaccctcaaggtgatggcattaggaggttaagccttacgggagactctgccctcatgactgggattagcaccttattaaaggcacaagggagcttgtttgttcctctcaccatgcgaagacacagcaagaaggaagcctctatgagaaagcaggccttcaccagacaccaagactgccggcaccttgatcttgcacttctcagcctccaggactgtgagaaacaaagttctgttatttataagctacctggtctaatgcatttccttgtagcagcctgtatggattaggacagtgggctcatgtggatgatgacggtgtctccattcaggactaagtaagcacatgagtccttaacagtggaagagaagggggaaggaaagagccacagagacatgtggccatagaagaagggcccatgggatgcaaggttgctaatggtgagagtggagaagagcccaaagccaaaaaatgcaggcagactccagaatgtggaaaaggcgagaaaaaagatcccctagagcctctagagatgaaggtagcctttccaccacctagattttagcccagtgagatccacatcacactctgacatacgggagtgtaataaatttgttttatgccctgacatactggtagtttgttgtagcagcaatggactagtaatatataaatatatatatacacacacacacataaacactacccccaccaccacacacacaacataactatctatatataccccgcccttcaaaactgaatcagataaactacacattagcattaacttagctgggtgtggtggcacatgcctgtagtcccagctacacaggacgctgagagggaggatcacttgagcccaggagtttaagatcagcctgggcaaacacactgaggccacatttcaaaaacaaacaaaaaacacaacaaatatttgattaagctcatttcccaaatttgaagaggaaacaattattagataaagaggagaaaagagaaaggtagagctgctgacttctgtggtggaagcacaggcacaggcccaaacatactcctgtcctcctggctttcctgtcccttctcataagggacacaggaacctctcaaactgaaccatggatcacagaaccatactcagaacgcaatacagttttgtctacaattttttatatatctgtgtccctgtctctgcctcccattcccaactcccttactcttgttagaaaaaaatggctattatcaaatatgagtacatccttatatactaatgccaactgatcaccagctggttttcttcttttacaaagtcataaatatttaggctttaacacatcttccaagcaatagaatgttattttccagttcattaacacaaattctatatctaaaatgaagacttcacaagttgatttaaataacatattaacgaaaatcgactggccatggttcaaactgacattttaattaaatgtgatgataggttgagtaacctagcagtactctaaaatgacttttggttatggctttttccatattatgcttaggctgaggcatccctaaatgattcaattgtaattccccttcttaaacatgagatttatctttacaaaataatttattttcttaaaattacaagttaattctatagttcatgcatacataatctcagtagatatcagctgtatgtgtacacacatacatataggtatttgtatatacacatattacataatttaaaaaaaacttattagcagggtacaaccacgaagacaaagaggctttgtgtaatgtgatggaaacacaactgcaggacaaacaacaggctgctgtgagggctgtatttaccctttctgatgtaagacttggaaaaacatggatactggatatctaatccccataacagaaaatttagggtgcagaaaacttcccacaatttttacagacaatgtcaatagaaaggcattcaatgcagggaatacacagtgtgacagtatacaaaaataagcaggttgatggtttagatttatgagacaagagaaagaaatagtagatgatgtcataattctccttttatggagttatgaaaattcttcattttatataaggtcaggtgctttcaaatgtcaatgagaaaaatatttaaaggaagaatcaaatctaagacgtagagagatctttataaatgtgaacttcaggccaggcacggtggctcatacctgtaatcccagcattttgggaggcctaggtgggccaatcacgaggtcaggggatcaagaccatcctggcccacatggcgaaaccccgtatctactaaaatacaaaaaatcagccaggagtggtgacgtgtgcctgtagtcccagctactcaggaggctgaggcaggagaatcacttgaacccgggaggcagaggttgcagtgagccgagatagcactactgcactccagtctggtgacagagcaagactccatctcaaaaaaaaacaacaacaactttttttcatgctgagaagatataatcatcaacacattcttgagcacaactatgcacacaggcacttccgcattcacaagccatgctgtgtgcacacactgatgcccctagattccttttttgaagaggtggtctcttggtgtgtcacccaggctggagagcagtgttaggatcatagctcactgcagcctcaaactcctgggttcaagtgatcctcctacctcaggctcctgagtagcctgaactataggaatgagccaccatgcccagccaatattttcatttttttgtagagatgaaatcttgctatgttgcccaggcgggtcttgaactcttggcctcaaggaatcctcctgccttgccctcccaacatgctgagattacaggtgtgaaccattgtgcccagccaccggattctttattaagaagaaaacttgtttgctgacatgtaggcaatgaattgatgaatagtagttcataaattactaatttacaagtcaatataaatgagttgagtaaacacaaaataacagcataaattaataaacagtttacgacctcaagtttctttttttcctttaaaacattgctctgacagagactactacttgtccattccatggaaaagtcagaggtggttaaaatgtcagaggtacacttattaacaccttgctgccttttgtgtagcttcctctcagtacttcaccagttgggattgacacacctctccagctgggttcaggagccagacaggagcacacagaacagggaatccaaagccatctctgacaccaaaagcaatgaaaacaaaaataaccaaacatattatcaagaaatgaacaagagatcgatatcaagtacagcaaaaagagaagaaatcacttaatctgccaggctttcattctgacaaaataatttacaacacgcatgtctctatctgacatgtgtgaatagaaaaataagaggtgacaatagagtagaggattcgtcttccaattgtctctgatctatccaacctttgttacacatcagagagctctccaatttataaataaacaacagagatatgcggcaaccaggacacagagacatactgagagtactgctcagctctctgcctaggcctgattctgatgatccctgacaatgagcactgtgaaatttacagcaaatcagtacacatacacacaaacacacaaaagagatacttcatgggcaaaaagcatcaaagatataaaataaaatgcctgaaagaccataaaacaacttctgatgaaatgctgttttcattttgcagtagtaaaatattcaccaccaaatctacaattagcttaaaaattacaataagtacagtacttttggatcccatctccaattcacaccttatcaacatgtaataatcacactgcatctacaacaaagctggatggactttatgtgctgaatacaacttgtacactaagaaggaaattttttgaaataatgagaatacaaaatttgtatgccatgctctacttcacaagttaaaagaaaatacaatcatttctatttttaaaatgcatcgaaataaaatacagaaaagagtattctaataccagttaacattaagagaatatatctctaaaccaaagatcttggatcttctagaaagacaaaatcagctggtatatatttggataagaaaaaaaaattaagagatcaagaaaggagagaagacgttcgcacagaatcatctccaaaaatggctttctgacgcattcgaccagttttcaagtctatttgtttttcctcctttggcatcaacagcctatatcaccaaggatatgcaaaataattcaatttgtacattaatcagctaatctagaactggaaatatagtcaatgaaaatacaaaagaaacagaaaatgtcaatgaattgcttaagatgtttaagatgacatagcgtagggaaaaaatgatctgataaacaccggaagagttaataaggaaactgaggcatggttccctaacaccacacttcaaaagaacttatagagagaataaaggaataacccttaaaaaaaaaatctaattttagaaaaaaattgctcaaaagggaagttagggttttatagatcttctggaaagctgattaatttctaagctaaaaacgcatgatccttaagagaaatggctgagtccaggcccaaggcaggaagaggacaaaatgagcctggatcctctggttctgtcagaaagtaagaaatgctcaaagactaacagagacagttgaagggacacaggagacaggccgaaggctcccgcagccgaatctgggacagcataggcatcagaaagtacaatgacagtgatggaaaataacccatggaataaaacgcaagtgcattagtcagccgtgatgctgaaacaaaggggagaagagaaagctctttgttaaaaatgccaggtaacaaacttagaaggaatgacagaggaataacatccattttgagtcaccagtgccataactgatagagaagattatcagggggctaaaatcactggatgaaagaaaactatatgaagctttttaacgtagcacaatagataaaagtatgaaaacataaattagaaaaaactaaaaatcataccataagggatggataagttagaatacaggaataacaggccaggcatagtggctcacatatgtaatcccaggattttgggaggccaagtcgggaggattgcttgagcccaggagttcgagaccagcctaggcaacatagtgagaactcgtccctagaacagaacaaaaaaaattagccgggagtggtggtgcactcctgtagtcctagctacttgcggggctgaagcaggaggatcacttgagcctgggagttcaaggctgcagtgagccaagatcacaccactgcactccagcctgggagacaaagtgagaccttatctcaaaacaaaaacaaaaacaaaaacaaaaacaaagaaaccacaataacaaaaaaacactggtaacaataaaatcatgattacataaagactgtatagaaaaaaaatcctcagaatatagaaataaaattatgtattttacctgtagctatattagaagagagtattcttgtagacaaggatgactagaaggatatgcaaaaatgaaaacagctaataacactcattacgtcaggcactgtggtaggtagtttatgcacattgtaacaaattatatactacattatctcaagattttcagataaattttactgggagtcataaatcaatacaacaaaatcaatgttttgcaaacatccactaagcataaaggtatacaaattcccaacccagactgaaaaataattcacataagccacacattagtggaaacctacccatgggagataatacaacataatctaaataaaactttcagagacaaggcatgtggcttctggacagccacaaactccctgactctgctctagtgtttcggccatcaaaagaaagccaagtggcctcaggtctctgaaaaaccaaaaaagcaacctatggaagatggcgtggtatttgaggaatatttgaagtctgttgaaaaatgcatcctgtattttttttcaagataagactcccttgtaatgtcaggtaagtgaagagccctcagagacacatgcacacacaaagaaaaacaaaacgacatagaatgaatcccaccaaaatgtgttatgatggcagaattatgggtgatacaatcttctgtaatatatctttttattaaaaatagaaaaaaagcagacttacccttgattatctatagcctctgacccaagtggtttggaattggaaagcagcgtcactcgacttgaagccatcttggcatcaatggtggagtaggtggagatgagactctggaccagctcatgggtgagccccaccttgtcctatcaaggccaccaagaaagggcacgtgaggaaagcacaaagatcctggagagacactggtttcactcagtttctcaaaattatcttagacacatttcctgagatcttttcttaatgccacaaacaccagagaagaaaatccttataacaaagcttgaaatggatccccatctccattaaacttgtccaaagctcagtgagtatataacctgataacctaaacacctagctagaaaaacctcagttccagtgctacaacagtgctagcttttctaacatttttaaataaccctgcttttaacccaataaaattcaactacagaactaagaaataaatattggaaatccactttaaaataatgaggagaccactgtgattgagaaaaagaaaaagacaaacgagagctggaaagcacactgattttgtagaaacagaaataagccgtgcaggtgccacactggcagcagtgcccgcgctggggccacggatcaaggaggcatggaggacaggactcttctgcttggtacaatgaaaaaatggtattctttttattctacatattgacaatatgcatttgggcctttattataagtacaagagaaaaatcttcaataaataaaagctgagtacattactttttttgattaaaaaatagattaggaaagaataatgagagttcagagcaaagactcctgcctcactgatgcctgaaaaccgtggctgccaccaaggtcaacacagacagcgtctttgtcatacagcacaccctcaactccagaaacaggcacataaaccagctgctccttcttatttaaacagcacttcttttgttattcaggaagaacacaagggtctgggaggaaaccgatgtcactcatggcaaaatgttctacccctggaagacgggacccaaaaagccagcttcaactgacaagaagtcagtaagtatctactgttgactggggggttaaaaacgatccacagtccaagggcttaacccatgaccctaaagaagggcattgtgccacactggaacagtggccctctagctacaagaggtcagagaagagggattcggtaacacctttgcaggcctacacatagctggcttacttttaaaacctccagcaaggccatcttcccttgtttggtcatttttcatttttcctgagaaatgaagccatcccaagaatcctatgtgcaattctagtatgttctacaacaagagaatacctggcatgtgaatttggcttttatctttgaagtgtgctcctcttaaataaccataaagtgacacctgccggtcacatttgatgtttgtttggatatcctccgggtttgtcaaatcttccatcctagaaaaataaactcaatcatacagcagaaacgaatgccaaagttcctatacctcctttcatgtgtcaatgactcatcacactcttgtccactaagcacatcacttaggaactagaaaatgcagaaataaggaagcaccgttcaccatccagcagaggaaaaggggcaggcacacaactgtgtctctaggctgaaagtgacattcattccataagacaccagatgggagacgacgtctacctggggtcagggaagagtgaagaacatatgcagaaaatccgtttctggaagagggtgagcctgtgctctgggatttgtactgtggcttggattctggcaggtggaaaaggggtattccaggctgagaaaatcacagcacaaagaagagcacaaaggaaggaaactgaaggcacgcacgaaggactccagcacccgggcacgaaggcagcatcactgaaaaccgaggctgaacgtaggatggggccacatcctgtagccttaaatgcttccaagtcctcccattttcctaaacatctcataattaatttactcccaaaggcacagcatctttgagcaatgatataagtagacattttccatcaactgcacttctacccccactattcaaataggcacaaaataaatcctatcactgttctttttctagcctttttagctttgaaatacatggcccaggaagaaaaagtttacaatcactttttacctgtctgccaggatataagggtgaaaagtttgccatgagaggcctaaacttcataactgtaataaaatggcccagattgtggatttcttggttttgatattctccatgcaccattccagaaaggtagaacagtttggcaacctaaacattaaaggaaaattaaaaattaaatttcaattaaattctcgtcaatactgcaacaaaataaaagctctaaacaagaagcaatcctaagaagggagacttccagcaaagccactgtcctgaggcttccagagccttgctggattctttcaggacttattagaaccacacagaggcagactgctctgcaaccaagccggtgcatctgtctaagtatggtgaggagagggaggtgaggcctctgagcacagaaacggttctgtggccgatggaccacagcagtatggaaaggaaggggcagtgcctggtcctgtaactgggagaaacttctgatgtactctattaagtcccgactccaaaacacccagacattgcctggtgcagcaggtacggagacaaatgagatacaccaagaggcccagaataaccactctcttgagggacaccttccagagactgggaacacatacacaaagggaattcaggaggcaattcctagagagatgtttagtaatgtctcttcagtctttttgtttgtttgtttgtttgtttgtttgtttgagatggagtctcactctgtcacccaggctggagtgcagtggtgcactctcagctcactccaccctctgcctcccagctttgagcaattctcacgtctcagcctccctagtagctgggattacaggtgcatgccaccacacccgactaatttttgccttttgagtagagacagggtttggccatattgccctgagctcgaaactcctggcctcaagtgatccacctgactctgcctcccaaagtgctgggattacaggcatgagccactgtgcctggcctctttagtctggttttaaaggattatactgttagtgtctaacaattatttctcttcctacctggtaaacttctgtccagaacctgtgttttaatcgcttctttgtcttcttcagttgcttgttatgcttgaaggagtcgaggtgggtgagaactcccagaattttaggaaagccatgtgcttgacagatgtttagaaactcaaacatttccatttcaaacccaaagctggcatctataagcatcagtacctacaagcacaacacattatttctcgaagaaactaccaaaacagaccacctacactaggggttggcaactggcccacgggccaaatccagcccatcacctgtgtttgtaactaaagttttattggaacatagccacattaattcctttacatattgtctatggccgcctgtgcactacaactgcagagctaagtagctgcagaagatatgatccacaaagctgaaaatattcactatctggccctcgacagaaaagtcccactccagactaaatcaaatgactacacaggcatcacccagacagagaaaccaccaccctctgacttgctctaaaaggcaaccataagacaaggccactaggatataaacatccattttaagaattctaatgcatgagaagtaactcagaaaaggctgggtctaacctggcccttacctaagaaatcctaatttaaagaaatgaagttttctgtaatgtatttttaagccaaataacaggtctctgacatccaaagaatgggaagaaagtgataatcaatgaaatatattaaatacgtacagaaaaccaacctcttctttcaatctcctcacagaaaaaaaaaaaaaatctttttttgctgggaagtatacaatggaaacctctaacttgtatgttaatttgtataactcaattgctcagaaatatttgaaatagctaccagtttagaattaagtaaaaaaacagaaagattatgatgaatggtagtctataagaaaatataagcagataagaccaatttttttttttttttttttttttgagacagagtctcgctctgttgcccaggctggagtgcagtggcttgatctcggctcagcgcaagctccgccccccggattcatgccattcttctgcctcagcctcctgagtagctgggactacaggcacccaccaccacacccggctagttttttttgtatttttttagtagagacggggtttcacagtgttcaccaggatggtctcgatctcctgaccccgtgatctgcctgccttggcctccgaagtgctgggattacaggcgtgagccaccgcacctggccaagaccaatttttaaaatttaagacacttcaaagatgcaaaataatttcagaactgattcctggaaacttgtaattttaatactaaagatagttctgtttctatctttccatggataactaaaaataacacaaaatggaaacagaaatgcccatccttgattaaactaggaaacattcaaaacccaaaaccacagaatatatgaagttgggcttgtaggaaagcacagctgccactgcagaccaaggcagcaagcagagctctccagcaacactggaccagctcaaagaacaggtggaatatcctcacaccacatctgatgccagagtgccaagggacaagcagctggttgtagggtcaggaataaaagggagcaaacagtccctcagctgccaatctttgccatctaagccagtgtcactcccctaatccacacacgcacgtacacacccaaatccacgtactgtgtgtgcctctgctgtactcaggaggctttgacaacccagagcagagcaatcaacataagctagactaaataaattatggtgcatccacagaatggaatgttatattaaaaagaaggaggcagagctacagtacttactgattatacaccttcaagatatattacatgaaaaaagcaaagcatagaacagtgtataaaataagctaccgtttgtgtttttaaagggtggcatgtgtgtttatatgtatctggaaggatatacatatacatatacatatatataaaggtctgcagggacctgagagaccagaggttacagcaaggaaagagaaaatgcgcattgtgtgtaccgtgcattacagttagagtgctttaccaaatgtgtgtgctccttttgaaaatcttaagatttacataggcatctctctcaatgatggttaagaggctgggaaggggagcagggagggagggacaaagagggaaaggttaacaggtacaaaaacacagttagatagaataaattctagtgtccaacagcacaatagggtgactataatttattatataattcagaataactaaaagaatgaaattaaaatgttcctaacacaaataaatgataaatgtttgaagtgacggatctctgaattaccctgatttgatcatcacacattgtatgcttctatcaaaatactacatgtaccccataaatatgtacaactattatgtatccataataactaaaactaaaaaaatgtaaatgcatctcttaatatgtatgtgtttaaaattagaaacttgctacattttaaataaaagagaaacaaatgacttctatgaactattcaatcatttcaagtatacaagtttagtaatctttacacaactttacattaattacacttatttttactaatagtagcattacatgttcaaaatttgaatgttatttagttttctgacattacaatggcacaactttaaaatctgtattactttttcctttatattttaggagtcttcctaggccaaagtataaaatctgtagctctagcaaaaactaaataaaaatgaaaaaaacaaggtatctgtcaccctacacctcctaatcaatatggcttatttttttgctaatttttttttttttttgagacagaatttcactcttgttgcccaggctagagtgcaatggcacgatctcgcctcaccgcaacctccatctcctgggttgaagcgattctcctgcctcagcctcctaagtaactgggattacaggcatgcaccacctcacccgtctaattttgtatttttagtagagacggggtttctgcatgttggtcaggctggtctcgaactcccgacctcaggtgattcacccacttcggtctcccaaagtgctgggattacaggcatgagccactgtgtctggcctttttttctttttttcttttttttgctaatgtaaaagatcatagaatatcagagatagtgaacattatcatttccataaatgtacattttccacacgctgagtactatctaaattttctattgataaactctgaccacttcttcaggcaattcatgtacttactttagcattatcattaaggatgaaggttctagaaccatcaggaacaagggtcccatcttcacacaagttacttaactgctgggaggctctatttcatcttatgtaaactatagataatacctactcacctcaagggtgtatcaagggtttatgtaagctaaatttgtagaaagcagttagcacagtgccaggaaggatccaagaagaaatggtacttactatgatatatttgtacatatatatgtatgaatgttaatgagctcttattagctgtgttcattaaaggttttctccatcctgtgatttgcttttagattttggaacacatttcattgtgcacattccatttgtattattaatatgacaacatttattactaatattattatcatcatcaattcaatcacatctactatatccctgataatgaccatgatccttttaataatcacaaaactctcttcccttcatcacggggtaaataacctaccacaatgctgtaagtctccatcagcaccccaggctgcccctgctcacttaccagatctgctactttagccagatcaatcatcatgttaatgtcacacccacattcaataatggtgagtctgcgctttttacctataagtgaaaagatgaaaattttactttaaaaagaccctgaaaaaactctaaccatcaactcttaattttcattttttaattgcatccagtaaaacaccacatacgtttacaggagtgtaccagaagttcatttttataggcaaaaactggtaaaataaattccatcctgtttttcttcctgtgttctaaatttagataatatcaaaagcctacccagatgaataaaagtgctcaaaacagggaaaattctgactagacaggctccacgataaccatgatcttgctgttcagctgcaggccaatgtcttcacctctatcaaaatttcctgtattcccactatcgctaaaaacatcctcaaacataatgcaacagaatatttacaatgataattatttctaaattaaggtaataagaaaatgatcaagaaaatattggctgggcacagtggctcatgcctgtagtcctggcaccttgggagaccagggcaggtggatcccttgagcccaggagttttgagatcagcctgggccacatggggaaatcccatctctacaaaaacataaaaattaaaaaaaaggaaaaaaaagaaaaattagccaggcatggtggcatacactactcaggaggctaaggtaggaggattgcttgagcctgggaggttgaggctgcagtgagctgtaatcacaccactgcattccagcctgtgccacagagcaagactctgtctcaaaaaaaggaaaataaaatatggatgcgccaaagataaagaaaagcctcaatccaactatattactgcaataataagagatttcagagtgtacattgccattctaccactggacgtttgtttcatcttccctcaaacttggaaaggtcaccatctcccaaagcagacaaattctcataggaaaaagagaaaacgcgcacttccaccagcatgtggcttcataagggcaagcatgtgcacctggcacataggaggtacgtgctgtctgttaaatggtgtgttcgcagtgaccaggcctgtcaggcccttccaaggaacatgcttggcaaagccatagagcagtcaggataaggtatgtatcacatccttatctctgggaacttatccttttatgaagttatagctaacttagtaaaagtaagagagaggtaacatgatatgacaatatttaacatgttccactcaagaaaacaacaaacacacgcatgtccctcagatgacaacagccacgccaagtctgtgtctgtggcaccatctcctacctgacacgatcgtcacagggcctctgatctcggtgaacttctgccaggtgaagttccgaatgaggcattatatcaaagtgctctttccaactttggaggccccgtcaccactaccggtattggtggcggctctagtggagttccatcaaccactggaatatgatgcttttgtgtcttcaaatccagagtcctatttatttaaaaaagaaaaaaaaagtaaactcacttttaaaatagagtaaaaggtatcaaccttataagtagacttttttttagtataattacagatatgagtactttagtatattttatagagagtacaacagacaatataaaaatataagtaacttgtcaattattaacttctgacccctatccaaatcaattgctgttcaataaagatgtaacaagatgacttcaatagtatagagttgaaaattaaacacaccttaaatctgactgctttatgagtgatttttatagttttttaaaaaccaaaaggtaaatactgaggcagtgcatcataacagataagagcagaggctctggagttaaatttggctctccgacttactggttgtatgattggaggtaacttgttttcttgacctcagttttcttgtccataaaatgagggcaagaatgattcctactctggtaaggctgctggaaggatttagttgaataacgtttaaagtacactgctaagaatatcataaggactcactaaataaagctatgttagtattacatattgtaatttttgtattttatattacaactttgtaaaacatatccagagggaaaaagcacacttatcaccatagaaacagtttaaagtttaggaagaatcaaattctataaattcttgtatcttgggcaagaaacgccaaccagtgtgcagatgctggaggcaaggcagcttctatggcaagtcttctcacgttttagtaaaagccacacagcatgcatctccatgtcctttggagctggactagacttgtgaatccaaatgtcacctgtgagaggctcctaactatttaaaaagattcaatggaagaaccatcagactgtagctaaacacacctgtgaaaggatcgagacatccacacagcagactgaactgcaaaagcattggcatttctcttctgggcattttcttagtctcctagctggagatcctgcagatgccacttctttttctttgcagctttgggtccaccgtttttctttctgtgtttcttctggtccttagtctccatagtggctatttaccaataacaagtaactctaacctacaaggaagaaggttggggtaaggaggtgggagaagcattttacaatccaggcaatacccagggaaaaacattaaatttcatttatttctttatgaagacatgatgtatttgttcactgaacaagggtagaaactgcttaaccatccccaatttcatttctctctgttatgctataaattagatgagttacctctgctaaggttacattctatggttaagttactttttattcatctcaagtgtcaacatcaccagtacctatttctgcaaggatggaaatattctatatctgtacttttcagccatttagccattagccacatgtggttacttaaaatgtacttcagagaaactgaaaaaatgaattcttaattaatttcattctaactctaaatagtcacatgtggctaccatactggacagctcagacctagacatcgactggactaacgaagtggtttcctaacttaaaccagaacttaaatttcaataaaaaatttaaaacgtttttatgaacttccaataggatcgcagtattacttttagtacctgttgactctaaaacttctaaattacagctcatctacatacatttgaaaaatagcaatatctgtatgtgtgagatatgactggttttagatgatgcctggagaccccatggacttacagagacccttccagtgatttctgaggtacctgggaatctgtggccaataaattggtagtcactgaatctgtgagtttttttggaatatcgggctgcataaaatctgacagcttgattgagaaaaagcggggcagggtaccatttcattcagttaaggtcctgtattcattccgtttaataaatgtttgtgtctgtctatgatgtgctagccactgtgccagaaaatggatatagctatggtctgattggcagaggaaatccaaactagtatcttccgtgccatgcaataagggctacattgcaaggctgcagagggtgctactggagcacagaagtgagtcagaggcttctcacagacacacacacgagcggaaacagaaagtctttatatatcaccatatgtcaaggaacactggccgggagttaggagagctgggcactaggaacgctttgaaactgaatagctgtgtgatttcagaggttatattgcttctctactatattttactgccgaacttgtactgtttctctcccttttcttcttggtgggaaaagcacaatttggggtcaacagattcggctcaggtctaagtcgcctgccgggaccacgtcgccaggaaacgacgtctccccgacaccttccctcccagtccgggctctctgcagggattcatcccgtcactctcccaacgacccccgggcacacctcaggcagatgcgaaatatgccgctcctcgggagcaaagatgacccggaggaccgggggaggaccttcccatgcgcacgactcgcgatcttcccagtgccccagagccacggacccaaccgccgcctaccccagcccgcggcaccaaacctgttcacaactgcgactccttaggtccgcttggacaccgccggaaacggaaattcaccctcgcgccgactcgccggagggaaacaaaaaggcagaaaaaaagggaccgccgcctggatgactttcaggggacagctggaagaaagactcgtcaacggccgagtgctggcgccggcgccgtctgcgcagtgcgttccaccgggtccgcgtccctcccgattcagccccaccccgccctcggaatccgctgcctcagctcctgctgtggcactccccagcagcttgcacctcgctcgcggagtccttgctgaaggccagggcagctgtgcggcctggcgcgggttacttgatgccgtgcaaaagccaggagacacatttggttctggccgccccggagtcaccgtgcccggggcgaatggactatggctggattgggagtccacttcctcctctgtaaagatgacagacgagggagatctcgcgttctgggggtgccctatagccctcttttggccagaagcggtggatcacgcctgtaatcccagccttttgggaggccgaggcaggaggattgcttgagcccaggagttcaagaccaatctgggcaacatagggaggctacatctctcaaaaaataaataaataaataaataaataaataaataaataaataaataaataaataaaaataaagccagcgtcgtggcagggcgcctgtggtccctgtggtcccagctactctggaggctgaggcgggacgatcgcttgagcctgggaggcagaagttgtagtgagctgagatcgagccactgcactccagcctgggcgacagagcaagacactgtctcaaagaaaaataaataaataaaataaggccctctttttccgggaccaacagactctgagggcagggacaaactgacccagcctaaactgcctcgccttccctgctcccgggaaaggggctttccctgagggaaggtagcatcttgccattttcttcctgcacagctttgccttcccagggatccacccattgccacctgaggaaatgccttggagcccatctaatccccagcccagctacttgggacgcctacagagactacattgtcagaggatgcatcttcctctagtcttggagggtttcttttcaatatgatcccaccggtgcatgcaaggctcaattctacatcaaaaaactaggcccactcctgtcaccgagacccccaggcttcaggtcctgtcacagtgaccttgttatcacccccagcagcccccaggtattcactctgcataggctatatactgggtgctgcactagggaggctacctacgtggcgcatgcttcccttatccctgaagagcttaggatgttgtaacttcttcacactaggcctcttacttcttggagatgtcagtagccgggtaaataatctttctaacatccttttggtctcatgaagcccattcttgtcctctgccctacctcagcttccccctccctccatgatcagaccttagaccttgtcaggtccaaggactgcaaccctcacagtatcccactctgaccaccacctcctatctagagcaatggagagactttgtaggtgaaagctgtctttgctactggttctcctatgctccctcgcctggctcctgcaggcggttgacttcaccagggacacagtggccagtgcccagcaggtcccactcctctcaccagctccaggcagttttattatagagtaactcttctgagacaccgctcctttccccagcacctaaggaagtatttctagtaagttccagtggtatagcatcggtgactctcctgacaagcagagggccatggctgggttcctctgatgaggtgcaggggcagggcactaagaggggaggactctcctgagttctctacctgagccctagactagtagctgctcctcctatacttcctactagtctgtgcctggttactccacttccctgttgcaattaacaattccctaggtacacttttcctgttcaaatgactgtgtggcttctctttcctaatcggactctgaccaatacgctatcatttgccaacaactcccaaagttttatcagtgactcagacctctaacctgaactccagctgcctccatgacatatccatttggatgtttaatggacatttccaaagtgatatgccctacagaactcagaatcttccctctcaaaccaactgctcagcagtcttatgatcttagttgatggcaattcagaagtgaattgcaggacacccggtttgtatctgcagagagaactggagaactgcttagtgtggaaaacccacacatttggtttcagaagtgtgtgagtagaaacagttttccttttatgtttgttggatggataatgatgaacctagcaggacacagaaagctaggcagcagtggaactgagaatgaagttatacttaatagcagagaatgaaaaagaaaagacagataaaacattttgaagaaaggacagtaatgtattcccaacaggtaggatttacaggatggagagaagaggcaaagataactacaaaatttctagcctgagagactggtagaaaaaaaatggtggtatcagggacagacaggggttattaagaaaaaggattggatttttaaaataaagaagatctggtgtaaaattatcctcaggaaaactggaaaactaggcatgtacttctctccatcatgcccttgcacagtgcagtccttctgcctgtccatgcctcgcctccccctccctaggattcctcttcctctcttaagacccatctcaaatatcacctagacttgtaagtaatttacatgaaactggatacctgaggtttcaagcctttatccctttgaaagtttttaataacaagttactgttatcttttactaagtccaagtttatattcgccattttaactagcatcatttccgtttccaagaggtatttggtgtgaaagtgcaactaagtttactgttaatcaagatcagaataaaagaatctaccaaaaaaattaacaagatcccccttttaatgcataatcttccatccatcaggctgtaagttaaatacctaacataaaagaaagctgtatgttttatggatatgtacatatataactgcagggaatatgatttggaaggatatacacttagagaagactggggtcacaagtggtagtcaagggagtcttcagctttctttttgtatttcaattttgacagaaatacatacatatgtattataattttaaatttttaatgaaaaaaagtatttttccttttttttcttgatctgtcactacattatatttttccaatatcagctaaacatttgcttcccagaaagcttagttgtcttttcaaaatttattcaggttaaaataaaagatttagacaatgaattaaaaatctaagatggtatttgcctactttatacagaacagtacattgatgctgctaaagcaattaaagtataatttttattttctttctttttttttttttttttttttgagatggagtctcactctgtcacccaggctgaagtgcagtggtgcaatctcagctcattgcaacctctgtctcctgggttcaagcaattctcctgcctcagcctccccagtagctgggattacaggcgtgcaccaccacgcccagctaatttttttgtatgtttagtagagacagggtttcaccatgttggccaggctggtctcgaactcctgacctcaaatgatctgcccgcctcagcctcccaaagtgctgggattacaggcatgagccaccacacccagcctaaagtgtgtactttttcttagctcctatatgcagtgctccttccccatgctgaatgtctgaatttttatctgagacatagtatttcagatggtcattacttacgggtggtcattaatagttcctccctgcttctaaccttcctctcctcattttaaattaagttacgctacattattgtggattagaaagtacattaatattaagtgaaaaaatatgatctgatgagtaagtggcaagagtgttaacgtatgaatattaagagttgttctgaggcctttttgcttttctgggggttctgtgcttgtggtagaactcttggttattttataaatagttgctgaaaagtgagagagtacagctggaaatcagatttctgatgaataaatcaaaccctattaagagaaccaggttgaagtaattttaaaaccatttggattttcataaatgttttgttaatgattaattataaaaaaaaaacagtgactctagctggaggcttttgtgtgtttgcttttgagtcagctaggaaaaggaagaaaaattcaagcttagtcaattgtggttttcactgaatcttttttaaagtaatgagctggtttgttttcttcatcactgtagcaacttaagctagtttctgcttttgatttttatttctcctagagaaacttagcatgcactgctcattagacttgagcatactaaggaatatctgtggtaattaagttaaaaatcagatcagtgctttgtgctgtgtatagttgcagatgtctgcatttcactaatattctttggaaacatctggataccagttaacataaaataactgtttagttggtttctgttcagaatagaaggaatgatttaaaagttcccattgtagtacatacgtcattctgtccctagcccttcctccagctttactgagatagataaataataaacgtcatgggtggtgtgtcttcagtttcctctggtgagctggatgcacagattactttgtcagcagggtggccttgatttttaggccatgtgtctaatggcatcagctctgtggccgacacctgtgtaccgagcccattcactatctagcttagccagccgtggactcctgctctttgttaaaagtatttaccttcattcctactagcacagttgaccaaagactcagttgatcccagacactagtaatgcatcaatggagtctaacagggttttaagatgtgtgtgtgtgtgtgtgtgtgtgtgtgtgtgtgtgtagaaatgggatctcactattgttgtccaggctggtcttgcacacctgagctcaagttctcctgcctcagcctcccaatgtgctaggactacaggcatgagccaccatgcctaaccctctaagactttgggatacaaaaatataatttactttcctccatttctggaataaaacatctcttccttcctccccctagtttctgttctgtgcccctgtttgatctctgttggtcctgttcaccttcagccttctctgctgaaggaggaaaggcttggttttataaaaagtgacaatattcagaccacataagatccttcttgcttcattttggattaaatattttaagattttctgattttcttgtatgcatatgtatttacctattatttgactttattgaataacttcaaattgagtatatttgaatgggaatgggcattaaaaagggctaagctttccctgcctttcagaactttgtatgtatatgtcacatcattttgtccttcacattctccagttgtgctattttttcccaatccattaagtagagtaacttcctttttggagtcttactttttttttttttttttttttttttttgaggcggagtctcaaaccgtcgcccaggctggaatgcagtagtgcaatctcagctcactgtaaccaccgccttagcctcatgagtagctaggaaatacagaagcatgccaccacacccagctaatttttgtattcttagtaaagatgggggtttcaccatgttggccaagctggtctcgaactcctgacctcaagtgatctgcccagctcggcctcccaaagtgctgggattataggcgtgagccaccacatccagcctccttacttaaatctcttaatgtgccttagaatgtagttaagaattttcaggtgacagtatatttttgatagttatctttggtttccaaacccagagaaggaagagtaactggctttttctgtttgtgggtacattgtgtcttattggagattgttttgtctcaagtattgccgcagagtattttattaatgggtgcactttaaaattttttgtttttcagattaacagtttaggtagcccagtactcggtatttgccaatttctagaattaaaaacgtgtgtatcactggttaactagaaatttaaaatgaaaatgtgtcttctttagcccaggcaatatcacttgcattcacttctatcccctccttgtccctactctgttggctccagggcttcttccactaagctggtactttctttatagctcctcctgtacttccattcactgaacctttattggttcatagcctacagaaaatgcctgtggtgtgagaggtaatttgtgaaactgcttctcttcactgtttagcaggttgagctctctaaatgggtgtagctgggaaagaaaatttaactttacaaacaagaattcctgggttccatccagcggaacatgtctcttgttatacacacacagtttctgacccatatcattccatgacttatgataaaatggacattctgtttacactgttgtgtggaaggagaggtctggttcctaatttttagtaacatctatttctagaatattaggcttgccatttgaatgcttctgtttgatttatgaatatcattggttccagcagtttttagctccctgctaaatgcaagttaaaatttttaagtttctaagttaaaagaaaataacttttcctccacttaagaaagccaggaaaattaaaaataatgtagtgatgacttccacaggctctaaaagagcaatgaaaaaagtgatttatgtgtgggagaagaaatactagttcttaattaatacattgttttaccacttcccgtgaatttatgtagaagtaatgaaaccaaggtttaagtcatttgttcaaactcctgtcagtttagactttttaattgctttgttacatgccattgctttgtaatacttgttatagcagtggtaacagttgagatttgcctgtttgaccacttgcagggcaccgtgccagattccccatgtgcgatgttcctcgcagttgtgacgcccatcctaggagggtggcgttagcacccctccatgcaagcggatggtgcaggctgggtcacctgggcacagcgcctgactattttcctggcttagtgtagttatcattaaatatgtggtattacttagaagcattttgaataatttgaaaagcacattttagtgttaaaacaatttttttttttgagaaaaggtctggctctgttgctggggtggagtgcagtgacctgagcgtagctcactgcagcctgcaactcctgggctcaagcgattctcctgccccagcctcctgagcatctgggactacgggcacatgcccccacacccaactcaattttttttaagatacaaaggattcatcttaatattatttacaatttttttttccttttctgtgggcctcatctgactggaaagcctttcaatttttttattttttaaattgtaaattgacaaattgtagatatatatttatgaggtacaaagtaattttatgatttatgaatacaacattacataattaagtcaagctgattaacctgttcactactggaaacaattgcaaataattatcattttttctggtgagaacatctgaaatttactcagtgattttgaaatgtgcagtactttttgttgttgttgtagaaatgaggtctcactatgttggccaggctggtttcaaactcctgagctcaagtgatcctcccacctcagccttccagtgttgggattacaagcgtgaactaccatgttgggccaaatgtgtaatctattattatttactgtattcaccatgctgtgcaatttatctcaaagaaacttattcctcctgtctaattgaggctttgtgccctttgaccatcatctccccatcacccccatccccaatgttgtatactgagtcctttcatgatatgtatggaggcttatggtaagttatttaaaagtacatgtatgtcaaaattttttgtggccatagcttttctttcttttttaaattttaagagtcagaatattcgtatattaattcagcatgtatttgagtgcctaatgtatgccattttctatgttaggaaccaggaattaaagcagtgaacataacaaagtctgccctcgtggtgctaacttgccaggtagggaagccagatactaaacacatgtataatgcaaagtcagtaataataaacgatatgaagaaacaagtaaggtaggagaggcaggaaagtgggagtgagaaagaggtgctcttttaaatacagtggtcagggagagcctctcagaatgaagtttttaacagagacctgaatgagatgggggagtcagctatacagatatctgctgtgtgctagaaaaattacctgtaattttgcattctaaaagtttaatgagtacatttatttcacaatttgagaatcaattatgtataagatatagttgtaagcacatactcctctaaatatgatttgtttttacagtagaccaaataagtatgttcagcttagaatatgctctttatgatctgtataataaatacattctcttaaaatattgttaatattaaggttgatgttttcagaaacatataaaaaagctagcttttaaaattgactagggaagttctctcaaactgccagtccctgagatattgtatattttctatctgaaaaacttttattctcagaattctttaaaagagctgtccctgaggctcccattacttacctgtgactcccagtggaaatcgtacccagcccctcgagaggggctgaatctgttgagagtgggagggtagaaaaaatgctgcagcttcttgtgggtaaacttcacacacaaacacccagtgtcccaagcactgtgcagtcaaacatcaaccctgctcagactttcctccttgggattgagaagcaatggattatagagaaagaaaggtggcttagcactccaaaacttggaagggtaattgaccaagaccccccaaagccaaagcagtgggcatccccactttctgtataccctataccaacacgtaatggctactagatacaggggcactagtacctgtctgcttggctacctccccttcttgcagaagtggtgaagggaatcactcaacctcaggaagggaaaatggctttctcatcttcaaattgaaagaggttggcagtgggtgaggagaataacaggtaaggatctctttcaatatacccatttgaagccaaaacctcagtttagacatacggtattttgaacctggtgactattcattgcccatgtttgtgaattatcagaaagcagaattcttgccaggcatagcggctcatccctgtaatcccagcactttgggaagccaaggtgggaggatcacttgagcccaggagtttgagaccagcctgggcaacatggtgagatcttgactctacaaaaaattcaaacattagctgggcatggtggcatgcacttgtggtcccagctactcaggaggctgaggtgggaggattacctgagcccaggaggttgaagctacagtaagcagtgtctgtgccactacgctcagcctgagcaacagagcaagaccctgtttcccacccctacccaccccctaaaaaagcaagctgaattcttgaactccctgcaaccaggtcacgcaaaccaaaggtaaaaggaacataaaaaagccttctggaaagtgtacagaaattcattgcagggtgatttttgtcttgtgaaatcatagttactgttattagcagctttttaaaatgttttatattcattttttatggtgttctgatgtatgagctgcttcaagtgcttttggacatagcttgggtataaaatgtaaaaagtggatattttcaatttgtagctttcttttttgaaacttattgaaatttgttctaaatataaccccttctttctcacccaccccaacacattttttaaaaaacaccaccaggtatccgttatagcactgatgtgagtgtagatgaagtaaaagctttggcttctctgatgacatacaagtgtgcagtggttggtaggtgatcgcttttcttgctacctaatgagaactctggggaaatatgtttacaaacatgttactgttaagatgctatagaaatataccttatcggaactgatttttttttaagttgtactctttaagacctgcatcatttctcaattactctaaattaagatatagcctttttttacgggagggatttttttacgggagggagctaattggattttaagtctagatctttgttttcaattcctcaacatattctataaataagaccaaattatagtagaaggagagtaaataagctattatctttttaaagtggtgaagagcactgattaaatatatattagagccccagcccccgccccagctgcgcgggcccccgcctggcccatggactgcacagccgagcgggcgccttgagcgcggtgcgggtcctcggagcacccccgaggtgagcgcaagcaaggtccggcatcatgtgctaggttattcccagtgcgaggccacacttgggccgtcggagcagcccctcctcacttcaggggtcaccctccccaagacccattgccccatcatggccggggaccggctccccaggaaggtgatggacgccaagaagctggccagcctgctgcggggcgggcctgggggggcctggtcatcgacagtcactccttcctggagtacaacagctggcatgtgctcagctccgtcaacatctgctgctccaagctggtgaagtggcggttgcagaagggcaaggtgaccattgtggagttcatccagccggccgcacgcagccaggtggaggccactgagccacaggacgtggtggtctatgaccagagcacgcggccgcagacagcttcctctccatcctgctgagcaagctggatggctgcttccacagcgtggccggctgcttccacagcatggccatcatcacggggggcttcgccaccttctcctcctgcttccccgacctctgcgagggcgagcctgctgccctgctacccatgagcctctcccagtcctgcctgctcgtgcccagcgtgggcctgaccctcatcctgcctcacctctacctgggctcgcaggaagacgtcctgaacaaggatctgatgacgcagaatggaataagctacgtcctctatgccagcaactcctgccccaagcctgacttcatctaccagagccacttcttgcgggtccccatcaacgacaactactgtgaaaagctgctgccctggctggacaagtccatcgagttcgtcgataaagccaagctgtccagctgccaagtcatcgtccaccgtctggccggcatctcctgctgtgccactatcgccatcgcctacatcatgaagaccatgggcatgtcctccgaagacgcctacaggtttgtgaaggaccagcgcccgtccatctcgcccaacttcaacttcctgggccagctgctggaggaccagagcagcccgaagctgctggccgccgtgcagggcgacgcgggcaccccctcaggaatgcaggagcctccccccagccctgcggccggggccccactgccatggctgccaccacctacctcagagaccgctgccaccaggagtgcggctgccagggagggcggcccgagcgcgggcaggaagcccccggcgccccccacggccaccagcacgctgcagcagggcctgcgcagcctgcgcctctcctcggaccacctgcaggacaccagccgcctcaagccctccttctctctggacatcaagtcggcctacgcccccagcaggcggcccggcggcccgggcccagcgaccccggcgaggccccgaagctctctgaaagctggacagccagtcggggccatgttgggcctgccctcgccctgcccggacgccgcgcccaggcacgcccacggcccggcgcgctaccccgcgcgcggcctgaacttcggctacgcggctgccgggccctggccagccggccagccccggagcctggacgccaccgctcgactccctgaagcgtcctcggtgcttcagccccgagggcgtgcaagggccgggcagggtgctgtttgcgcccttcggccgggcgggcgccccggaacccaacggctgcagcgacctgccacggcgggaggcagcaagggctgagcccgggacgcgcggaccagctggtcagacgagctggccccggattcgcacttcaagtgctgcagctgccagatggagttcgaggagggcatggtggaggggcgcgcgcgcggcgaggagctggccgccctgggcaagcaggggagcttctcgggcagcgtggaggtcatcgagatgtcctgacccctccgctgccctcggctccgccgcccgcagctgggcagttataaatatatattatatataatgcaaagaaaggcaaatggttttactgcgatttttatccagaagtaaatatttcgattttttatttatttaagctgttcattctggcactgatttggcaacagtgcgggtggtcctcgagctctatttttactgtctggtatttaaaccgaaacacacgtttctaagcaataagaggccaccttcagtcgcaagttgcaggccaggcctggggcccctccctgatcccccgccccaggaaacactgctgacatttgcagaggctgccgagctttcgtgaactttttacacaagagaaagttgaaaaaaaaaaaaaactttcttgccacaaactgagccgcagaaacccccttcttcccccacccaccgcccctgctctctcccttcgggctccgccccaaagccataggctgggggagcaggacctggtgtgccccagagaggtgcggccagccctccaccagctctaggcaccaaatcttggtggcagggagggcaccccgctgcccgttgccccagagctgttccctctcaggggaggacatgcattgggccccatggtgccagggcgttgagaggggctgaggaatagaacagtgtgtgtaggggcttggggcagggggttctggagggtcagatgaggcagagcccaggggaggatgggggtgttattaatgccccaactcctgccagagccccagtccagccactgagtgcctcagaaaggccattcccagagggctgcggccctcccttctcctttgcccctgcccccagagctacctgactggcagggcggcactactgcaggagaggagcttggcctccgggggtcaggcaggaggggggcctggctagcctgtgctggctccactgggcggggagccctggactgccaggtatgaggagggggtgggcttagggtcctgttccaggtccgtcccccacctagcaaggccccaggcaggacttggaaaccaggtgtgcacctgcaggctgaggggctccatgagcaggtgctgccttgcacagggagttcaggcgccagccaagcccctgtgcttctggggtaggcctgcttcacttagggagcgctgcctcaaggcagataaagcccccttgttgacccgacctgcatgggggcctctcaggagagaaactctcgtgcgcccctttcccagggcgccctctttctagacagcattccagcccccaaacacaggtggcttttgggcccagatgggtcagcctgctgctcctggcccataccctctcaggccgttgggactcctgcccttcagatgtcctagggtctaggagtgggccagtcaccctgggaagaggccaggggcttggcaggaggggcggcccaggcgggacccagtcctgagtcctggagcagggccagggaggcgcccgccccaccccagccagccgccttctctgctgtttcttctatttgttcttcttttcacccacagccctgtgttcctgtcatccctcctttcagcaaaagtcctgttcccgttccctctgtccccacccactcttgttccccaagaaaataagctatcattgttgcatttgcaatctatggattagaggtttaagtatttattattattggttaattattattatgttttatatatatatattagaacttggctagccaattttattgaacaattcctgttcaataaatgttgtttaaagtacagttgagaaaacgatggtaggtttatttcttgaactttcagaagttcaagcttaaagcatcacacgtttttctaatatcgtgtggcgctttctgtcattttacttttttaacctttatatggaatagcaaccatcaaccttctctttcagatgtgccgtttgggggtgctaaagctggtgttaagatctatcccaagaactataccgtaagtatgaaagtttttgtttttgtttttgtttttgcttttttgacacagagtcttgctctgtcgcccaggctggagtgcaacggtgcgatctcggctcactgcaacctccgcctcctgggttcaggcgattctccttgatccagtaactgggattacaggtgcatgccaccatgcctgactaatttttgtatttttagtagagaggggatttcaccatgttggccaggctggtcttgaactactgaccgcaggtgatctgcccaccttggcctcccagagtgctgggattacaggcatgagccaccgcacccggcctcaaagtgatatttgtgcacacagtgcatttatgaaggacttgaaattactgggcttctctgtatcccccatatcagtgaaatcaatagtccccattgcttttcaaatggaatgaaaaaagtaaagaattaactcattgagtgttttgccatataaaggtcacctacttaatatctatatcctttatcattttctgttttgtttggttttgtttttatgagtcttttttttttttttttttgctttttgtattattattttcttatttaaaaggtaattaatatcttcatattattagacacctatacccatatttaagaagtactgtgatctggctgggtgcggtggctcacgcctgtaatcccagcactttgggaggccaaggcaggcggatcacgaggtcaggagatcgagaccatcctggttaacacagtgaaaccccgtctctactaaaaatacgaaaaattagtccggcgtgttggtgggtgcctgtagtcccagctactcaggagactgaggcaggagaatggagtaaacccgggaggtggagtttgcagtgagccgagatcatgccactgcactccagcctgggtgacagagcgagactttgtctcaaaaaaaaaaaaaaaaagaatcactgtgatctaattagccaggcatagtgacgcacacctgtaatcccagctactcgggaggctcaggcatgagaactgcttgaacccaggaggcagaggttgcagtgagacgagatttcaccactgtattccagcctgggcaacagagcaagactctgtctcaaaaagaaagaagaaaagtagtactgtgatctgaagtttttaggtcaggatctcatgctagtgacaaatatcttaactaagccaataaaaaccttactttttatcctgtcagttccaagtaaattcaaactggttgtcacaatgctttacataatactaaattatctatatacaaacataaacagatatgatttttattctctttaaaattcaccatttagatggaatataattatattacagttaaccttaattaagatttggtatatttttcagtggggaattaatagaatgggaatttgagtcctggttctactatcttgtttttataacctacttttttgatcccttattttctcacctttaaaatggcattgcctaccttatgagttgttctaaggatgagaagacatgaaaatgtactataaatagaaaataagatgctagctataatctcaagcgatttttatatcttttttatttttattgttttcttattttacaggataacgaattggaaaagatcacaaggaggttcaccatggagctagcaaagaagggctttattggtatgtgtagccacatagattttggcataaagtgggaacatctaaaaaaatcttttttttttttttttttttttgttttgttttgttttgtttttgagacagagtcttactctgtctcccagactggagtgcagtggtgcaatctcctccacctcccgggttcaagcaattctcttgtctcagcctcccaagtagctgagactacaggcatgtgccaccacacccagctaattttcgtatttttagtagagatggggtttcgccatgttggtcaggctggtcttgaactcctgacctcgggtgatccacccatcccagactcccaaagagctgggattacaggcatgaaccactatgcccggcctcctactatttgtgataggagcttttgccaaacatacaacatttttgaagacactaatcttcgtttgcttgatgtcttcgtatcttactattatctgtgtttatatgttctttgtgtgtgatctgaacattcttttctatgatatgtaaatatttgtcatttaccttctaattttcaggcagtttaaacctttctatacatatatttttaatctagaaggcttctaatttgtttgaatagaatacacataattatttaataaaatgcttgccctatcagtatagttaatagaatgttaatagttaataatataatacttgccctatcagtatcagtatagttaaacaaaataaggtctacttaaataggaaataaagtgtatttttctctactttctttctcagcatttcccccaccatggacaaatgcctatgaaattaaactataaagtctgggcatggtggctggtgcttgtaatcccagcatttttggaggttttggaggctgaggtgggaggatcacttgagcccggaagttcaagaccaccctaggcaatatagcgagaccccgtctctacaaataatgaaaatgttatccaagcgtgatggtgcatggctgtggtcccaactactaagatgggaggatcccttaagcctgggaggttgaggctaccatgagctgtgatcatgccactgcactctggcctaagtgacaaaacaagaccacatctcaagaagaaagagaaaagaaataaagctattcagattcatttttaggaaaaaagtcatgaaataaatgtcatgaaataacctaatatagaaatacagtaagtataggtaactctaaaacttgactagatttggcctgtctttcataataaaaggcatttgggcctttgacgtgccgcatacccagcactactgtgaatttgtgcatcattacgaggagcctattaacatgagtgaactatctcactcacacttttataggagtacctaccgattctgagatatggtgaattgaagtcatgttcagcctgttaatagccttcataattttcaaaaggtctttcctcctcgcctaaatctcaaacacattttatagtcttgaatggtttcagactttattcagtcatatttatcgcccatatctgcaatatctccagctaaattttatcagtcttgacaagtacctaataattccaaaggtcaaaaagtgattcattggaatactgaaagaaaacacagcttaaactctagtaacttgatttatttgcctaattcgcaaaggcctcattgacccatgatgcagctaaattgacgtcttggcccagacagctttgaagcctaggaggcaggcaaagggagttttttctctcacttctcggcaaaccttcaaattcgatgctatttatctgttatttcctgacactccacagagagtgtcagattgaggctcagacctgagcctgagccctgatcctatcacatgtgtgtttagcatcagcttgtaaatttctacaaaacaaaacaaaacaaaaaaaaagaggctgggattttgataggaattgcattgaatctgcacaccaatttgtggagtattgccatcttccccaccctccccaaaagggttttgccctttcacccaggctggagtaccaggcagcagtcactgcaaccttgacctcctgggctcaagcaatcctctcacctcaccctcccaagtagctagaaccataggcgtgcgcaactgcacctggctaactttttaattttttgtagagacatggtctcatcacgtatcccagactggtctcgaactcctggaatcaagcaatcttcccacctcagcttcccaaaattctgggattatgggcatgagccactgcacctgaccagtattgccatctcaaccatattaagccttccaatgctgaatatgagatgtctttccatttatttaggtctctgatttctttcaatgatgttttgtagttctcattgtagaagtcttacaactaagtattgtattccttttaatgctattctaagtgacactgatctatcgttttcttatgatgtctttgtctagtctttgtatccagacaattctagcctcatggaatgagttgaggagtgttccttcctcttctgtttttggaaaagcttttgaaaggtcggtgttcattcccttgtgtgagtgtaaatatcacctatgtaaagttctgcaggaccctgatgtctccacccttctcatcctcttatatctctgtgcaccaaaattaccctttcatctcctactctatagtcacatgctgttagaaaagttgcttttttaaaaaagatgaacttctgcctcagaccgtgctctctatataagaatttacctgttaggccagtcgcggtagctcatgcctgtaatcctagcactttgggaggccgaggcaggcaaatcacctaaagtcaggagttcgagaccagcctggccaacatggtgaaaccccgtctccactaaaaatagaaaaaagtagccaggcgtggtggcgggcacctgtaatcccagctactcaggaggctaagggaggagaattgcttgaacctggaaggcagaggttgcagtgagctgacgtcatgccgttgtactccagcctgggcaacaagagtgaaactccgtctcaaaaaaataaaaattaaaaaaaaaagaagaacgtatctgttattcaggagctacttgtaatctgtgcatcccaatacattagttttgtatggagcagaaaactagtaagcctaataattgataccttgtgattttgttttgggtgggtgaagctgtttcatgtttaacatgtatagactgtttttgagaaggattttatcattatatgtttgtgatttacaaactgtgtgcttcagacttgccacttgccagagcccttctccaattggaattgttttttgtttttgagacagtctcactctgtcgccaggctggtgcaccgtggcgtgatctcagctcactgcaacatctgcctctgaggttcaagcaattctcctgcctcagcctcccgaatagctggcactacaggcgcgtgccatcacgcccagctaatttttgtatttttagtctacaacagggtttcaccacgttggccaggatggtctcgatctcttgacctcgttatccacccaccttggcctcccaaagtgctgagattacaggcgtgagccaccgtgcccagccagcttttttgtttttaaaatatattgtttaatcaagatgggatctcactatgttgcccaggcttgtatcaaattcctgggctcgagccatcctcctgcctcagcctcccaaagtgctgggattacaggtgtaagccactgccccagcctagttggaattgttgtttgaggtaacaagcttacttaatcctaaagcaagcataatactttcgtagatgcctctagaaagattcgggaccaatttgtcatttgtacattgggagaaaaggagtggttaaacaaagttttactgacctccagcagaggtatgtcactaaaggaatggaaagtgagcaaacaggagctggagagcaccagagagcccttttgtcagtggatgaggctagaatatggcattaatccttccaagtgctgtgtggggttagacttctcatgaaggataggtttgggtaggttagacttcatgagatttttttctgtttttaagttttttgttgtccttgttgacttcatgagatttttaaggtgactaagggaagggtgctaagacatagagttacagattaggtgggaggtggagagggttggggtataaaaagcagtccttgaacatttcaaagttgtcttataccagccctgtatccaatatatcacatcttgttcaaagaagttgattatctaggccttgggcccctgagttaaagaaaaacattacagtatactgattccgtcgactaaaaagtaaaatttataggaagaattgagtacagtccttagaaagaactttaattattttatggggggacataatggtttaatagtttaacctcttttttttttttttttttttttttgagagacagagtctcgctttgtcgcccagactggagtgcactggcgcaatctcggctcactgcaacctccgcctccagggttcaagtgattctcctgcctcagcctcccgagtagctgggattacaggcacttgctatcatgcctggttaatttttgtatttttagtagagacggggtttcaccatttggtcaggctggtctcgaactcctgaccttgtgatccactctcagcctcctaaagtgctgggattacaggtgtgagccacaacatccagcctaatagtttaaccatttttaaagttgtgtttttctttttgtaaagatgagtttctattatacagttgaaataatatagaaagttataaacaatatatatatggtggggagaaagaatggggaagagaaagaaaattgtaagtgggaacatgttatacatgttgtatgaaacctgcctttttccatatgtatgtttgtgataattccaagtaatttacatgcatatgttatcctttttaatggctgtttagtactttgcataggtataccatagttcatttaattgacatacaagataattagattgtttttatttttactatgtttgagaggagtatttctgcacctttacggatttgagtgagcatcacttaacatgtttttatcagagatcttactgtagcagtcagtagtagtgcagtcagtgatttctgctatggcctgtaagctaatttgttagcctaacacttcaatttgctatgatctgaggaactgaaagctaaggcctaaaattttatatgtgctaagtgtcgaataataggtcaaagctgcattcttccacaagtaaagataatatggggcttaacacaattgctttagcaatgtgattttctcccctttttctctacttggtaaggagggcttatacccccactaagcaggcacatgcctgtaatcccagctactgaggaggctgaggcaggagaatcgcttgaacctgagaggcagaggttgcattgagctgagattgtgccattgcactccagcctgggcaacaagagtgaaactcaaaaaaaaaaaaaaaaagaaagaaagaaagcaagcaagaaagaaagaaggaaggaaggaaagaaagagagagaaagaaagaaaagtaaatctgtggatattgtacaaaagattgttttatgattttttaatttttttaacataacttttattgacttgtatttgtatttttatcaaacatacttcatttgtttatttatttattttgagatgaaatctcactctgtcacccaggctggagtgcagtggtgggatcttggctcactgcaacccctgccttccaggttcaagcaattctcctgcctcagcctcccacgtaactgggattacaggcatgagctaccatgcccaactaatttttttattattagtagagatggagtttcaccatgttggccaggctggtctcaaactcctgacctcaggtgatccacctgcctcagcctcccaaagtgttagtattataggcatgagccaccgcacccagcctcaaacatactttagacaatttttcacctcagcactattgacattttaggctatgtaattctttgttatgggggctctctctgccttgtaggatgtttagtaatatccctggcctctacatattagatgtcaggaagacccctcagttataacaatgacaaatatattcagattgccaaatgtcccctgtggagcaaattcatcccttgttgtgaactgtgatccagagagccaaatagtgatacaaggtttattgttcacaatagctcgtcccctccaatccagacatctgcctcaccatattccactccccagaggcaaccactttcaacaatcttaaatgtttcatttttattctatttaaagcctttgctcatttttaaattgggttttgtccacattattgagtggtaagagttctttatatactccacagccagttgtggtagtataggcctatggtcccagctactcagaaggctgaggcaggaggataacttgagcccagaaggtcaacactagtctaggcaacatagcatgaccctgtctctaaatgagtctttgaagtatatatattctaggtaattgacctttatcatgtatataatttgtaaatatttcctctcaatctattagttgtcattgcactttcttgatagtctcctttttaatcttgagaaagcataatttatttttcctctggttggtgtgctttaggttgtatgtaagaaaccattgcctaatccatagtcatgcagatacatccctatcttttttttttttttttttttgagatggtctcgctctgtcgtccagattggagtgcagtggtgtgatctcatggctcattgataactgcagcctctacctcctaggctcaagcaatcctcccccttcagcctcccaagtagctgggactatagcaccagctatagtcagcctcccaggtagctgggaatatggcaccaggactatagcacataccaccactaagcacagctaatttctgtattttttggagagacaaggtctcaccatgttgcccaggccagtcttgaactcccaggctcaaacaatcctcccacctcagcctcccaaagtgcaggattacaggtgtgagccactgtgcctggcctagagaggtttttttaagaaatagtgaccaaaaatatcccacatttgatgggaattgtgaatctacacattgaagatgctcaacaaattcaaagcaggataaactcaaagagatccacactgacacacattataatcaaattgtagaaagctaaagacagaaaagcagcaagagataagtgattcatcctgtacaagggatcttcagtaagactaacagttgcttatcagaaatcacggagtatagaaggcagtggtggtgtgctgggcatggtggcatgtacctgtagtcccagctgactgaggctgagacaggagaattgcttgagcctgggaggtggaagttgcagtgagctgagatggcgccattgcactcccgcctgggcgacagagcaagactccatctcaaaaaaaaaaaaaaaaacagggttggggaagctcagcatggtggctcatgcctgtaacttcagcacttttggagactgaagtgggatcacctgaggccaggagtccacaaccagcctgggcgacataaggagaccccatctctacaaaataaaaataattagccagacaaggtggctctggcctgtggtcctagctactcaggaggctgagacaggaggattgcttgcagccagcagtttaagactagcctggacaacatagtgagaccccgtctctacaaaatataaattaaaaaaattagctgggcatggtggtgtgcatctgtagttccaactactcatgaggctgagacaggaggatcgtttgagaccagaagttggaggttacagtgaggtatgatcataccactgcactccagcctggttgacagagcaagaacctgtcactaaaaaaataataaatgaataaaaatataagaatgcttggcctggtctgggcgtggtggctcacgcctgtaatcccagcactttgggaggccgaggcgggtggatcacctgaggtcgggagtttgagaccagcctggccaacatggagaaaccctgtctctactaaaaaaatacaaaattagccaggcatggtggcacatgcctgtaatcccagctactcgggaggctgaggcaggagaattgcttgaacctgggaggcagaggttgcagtaagccgaggtcacacccgattgcactccagcctgggcaaaaagagggaaactccacctcaaaaaaaaaaaaaaaaaaaaaagaatgcttggctgggcacagtggctcatgcctgtaatccctgcactttgggaggccgaggcaggtggatcacctgaggtcaggagttcgagaccagcctggccaatatggtgaaaccccatctctactaaaaatacaaaaattagctgtgtgtgatggcacgtgcctgtaattccagctacttgggaggctcaggcaggagaatcacttgaacccagaaggcagaggttgcagtgagcagagattgcgccactgcactgcagcctgggcaacagagcaagactcgggctaaaaaaaaaagctgaagtgagtccttcaggctaaaatgaaaagatacaagataataactcagagctatatgaaaaaataaaaatcactggtaaaggcaactatatagctaaatataaaagctagtattattgtattttgggtatgttattcctctttctcctttatgatttaaaaacatgcatgaaataatatgcatctatgttaataggaactaattgtttaaagacataatttgtaacaatatagctaggggacagagaaaggagcagagttaatgtatgctattgaagctgagttggtatcagtctgaactagacttagaactcagcatgttaactgaaatcttcatagtatccactaaaaacaaaactttaaaaatatacagaaaaggaactaagaaaggatcaaaatattacaggataaatcattaaccaaacacaaaagaaggtactgaggagcaaaacactttatgtagaaactaaacagcaggatgacataagtaagttctttggtgtgtgggtttttctgtttttcttttttggggtttctttgagacagagtcttgctctgtaactcaggctggagtgcagtgtttcattctcagctcactgcagcctttgcctcccaggttcaagtgattctcagcctcctgagtagctgggattgcaggcgcccaccaccagacccagctaattttttgtatttttagtagagatgaggtttcactacattggccaggctagtctcgagctcctggcctctagtgatccacccgcctcggcctcccaaagtgctgggtacagccatgagccactgcatccagcctgtttttggttttttttgagacagggtctggctctgttgcccaggctggagtgcagtggcacaatcacggctcactacaaccttgacctctgcaggctcagctgatcctcccacctcagcctcctgagtagctggaactacaggtgtgcaccaccatgcccagcttatttttctattttttgtagagacaggagtcttgctatgtcgcccagcctggtctcaaactcctgggctcaagcaatctgcccacctcagcatcccaaagtgataggattacaggcgtgagtccaaccataagtaagtttctgttttttgtttttgagtcaatctcactctgtcccccaggctgaagagcagtggtgcgatcatggctcactgcagcctcacctccaggcgggagccaccgtgcccggtcaagtaacttttctgtttcagtaatcactttcaatgtaaataatctcatcaatggaaagatcggcagaatcaatttttttaataatgtaatacataatccaaatatgcaactcacaaaatactcactgtagacccaaagacacaaatttgttgaaactgaaaagatggaaagagataatccatgcaaatagtaaccaaaagagagccagggtggctatactaataataccacacaaaatagattttaagccaaaaactgttacagaaaaacattttatgttcgtaagagagtcaaatcacaagaagatgtaacaattataaacacatatgaaccaaaaaaaaaagggctccaaaatgcacaaagcaaactaataaaattgaaggaagaaacaattttacaataatggagacctcaatgcagtggctctatcacagctcaccgcaatctctgcctcccagactcaagcaattctccagcctcagcctccccagtagctggaactataggcacacagcaccacacccagccaatttgtgtatttttttgtggagacggggtctcaccatgttgcccaggctggtctcaaatgcccaagctcaagcaattcacccacctcagcctcccaaagtgctgggattacaggcctgacctactgcgcccagtcaacaccccaccttcaacagtaaatagaacatctagacaaaatcaataaggaactagaggaattgaacaacacactaaaccaactagacctaacagacatatagaaagctctccatctaacaagtgcagaatatatattcctctcaagtgcatatggaacattccccatgataaatcatatgttaggtcacaaaacaattctcaatacattttaaaaggtcaaaattatatgaagggccacatgtgttggctcacagctgtaatcccagcacttagtgaggctgagacaggcggatcacttgaccccagaagttcaagaccaggctgggcaacatggtaaaaccctgtctctacgaaaaaaaaattttaaaattagctgggtgtagtggtggtgaatacctgtagccccagctactcaggaggctgaggcaggaggatggcttcagcttgggaggcagaggctgcagtgacccgagatcataccactacactccagcctgcaggacagagcaggacctgtctcaaaaaacaaaacaaaacaaaaaaaacaaaaacaaaacaaacaaaaaaaaacaggccaggcttggtggctcatgcctgtaatcccagcattttaggaggccgacgcaggtggatgacctgtggtcaggagctcaagaccagcctgaccaacgtggcaaaaccccatctctactaaaaatacaaaaaattagctggaaggggaggcaggcacctgtaaccccagctacttgggaggctgagccaggataatctcttgaatctgggagacagaggtttcagtgaggcgagatcacgccgctgcactcaaccttgagcaacagagtgaggctctgtctcaaaacaaacaaacaaaaaaattatacaaaaaaaaaaagtgaactgcatgttgctgcacagtctaccatagcacaaatgtcaattgcttcttggctttcctggggtgatgggaggtctgaacctaacacagtctcacctgatccttcacaggagtcacgtagcctttctctctccagtccacagatgtggggatctcaagaagcaggcgttcctggaactgtttcccgttcctgtgcttctggtattgaaaaccattcatcacctgcctgaattcttcagtggtcttcaaagaaaagtaaataaaatgttaagaagcaagagattaatttggtaaagaactgaggaggggaagcacagagctgggcagcccacagcatacttaccatgtctccaaaggtgttcatggccattgtgaagctgtgtttcccttggctgtattcctgattgtgctgctcagtcatcttcatgttctctcacactgctctcctccatccttcttcattctaaaggcaaacatgtaactgatgttcttcatttctttttttttttgagacggagtctcgctctgtcacccaggctggagtgcagtggcacgatctcagctcactgcaagctctgcctcctgggttcatgccattctcctgccccagtctcccgagtagctggaactacaggcgcctgccaccatgctaactttttgtattttttttttagtagagacggggtttcaccgtgttagccaggatggtctcaatctcctgactttgtgatccgcctgccttggcctcccaaagtgctggtattacaggcgtgagccaccgtgccccgccaatgctatttatttctaattaaaacccaacatatgctaaccaagtgaatcttcagacagagatgtaagagtaaccatggccagggaaggcttgacacttctaggagatgttttccaagctgagacacaacaagggtgtatgcccatatcgtgctcataatcagtgctattaagttattgtgttagcttattggtaggagccagcctctagaagccactctctggccatatgatcccaatagcaatgcccatctctctggtgttcccctggacagtttcagatgccaccaaccatgtcatataatctcttgtgctttgccttccacttggtccattgtgcgtctagactgtggtcacgtgttagagcagctgaggcaattcccaggaaaaaggcagccaggaggagtgaaggattcatgtttcaaaaatctaggaagggaaaagaaatgaggatctgattagaccgatcctaaaaagccattttactaccccctgagaaactagggccaccatggtagaataaaaatatttaaattattcttccaagcatttacctaaggactgtggaagaggccaaggatgtggctggagaaaaacagggcaagtggaggtattggagggacccaccaaaatgaaaagcagcctgtccagagctgtaggagttgaaacagttttctgggatgatgatgacaggctatgaaaaggacaggaaggtacctgatgggcgagaagcttaaggcaacaaccgggaaactaggaaaccgttggcccaggttttgtaccaattgtgctgaggtcatccaggcaaaacctcaagaatgaagacatctaatttcaagaagggacaaagggatccccaataattgggaagtcacatcacaccttgttcttggctaatacacaacagaaggtgaagtatgttttccaaatgccccttgtaatgaaacagttattgaatgtcttcccaggacaaactgggaaggagagcacccatctaccgccgttcccgcagtcctgcagtcctgcaggtgggccagtcctgccaacactccagctcccctcacagagcataaactgaatcaggtggccgaaccaccggaagccagagtccccagtgtccgcgcccacacaggggtgggtaggcagcttcccaggctttgggctggggacccaggccaggtcccctggctcttgctcccgccctccgctcatgctcactgtggccccaggacgtgggcgatgttgcagggagcaaggggcgcctctgcctgatttgccggggtcgagcctccctgtcccacccccaccggccctgggaatactgcggcctggcactccggaaaatccctcactcacagagctgaaggacttgctgggtccctggtggcccctgtccaatcttagcccactggggtctcagctgctgtagccacaggtggacaggcacagtgggcaggtgctgggtccaggagtctcctgtcgcctaaggccgcccgaaagcagctaattgacctctaaagcccctagacccccctgcccccttgccgcccaggcaggcccgcccccaccacttgcccgctctgcgattggctgcgccagccgctgggcggggccttccggcgtgctgactcctggcatgtggagcagctcagtccccttgcctcagtggaaccgggggaggggagctgggggctacgaagagaagggtcggaggtctccctggagggttcggatcaactaagtaccctatttaatgccctgggcgggtggtttatgaaaagaaatttacaggagccctgtgtgcattttcagcttaaccctgcttttcccttaggcctagaatttttgattaaaatctcctgcagggcagagagccagaggactgtaatccagtggttcctgtttagtccacagcaaaggtgcggctggctggaagaacgcacagcctgcaagcagaagccttatctcccaattaagggtgtagaagaatctgggcgtgttgctggtgtctcatgcctgtaatcccagcactttgggaggctgaggcaggcagatcccttgagcccagtagttcgagaacagcgtgggcaccctggcgaaaccccttctctactaaaaatacaaaaattagccgagtgtggtggcccgcgcctgtggtcccagctagtcgggaggctgaggcaccagcatcgcccagcccggaaggttgaagctatagtgagccgagatcgcaccactgcactccagcctgggcgagaggagaccctgtctcaaagacaaaaaaacaactggtaggaaaacgcaccctcaaaacacatgatgagatggtcgagaccagaccctaggagggtgggtactggctgggtgggtatccagagaccatgggcgtttcataatgcattgtttcccgtctcctccactcagcgactcttcttcccctgaagtcttgcattaagtaagtgaatgaatcaatcatcaagttaatgaagctctgactttgtacttgttgtcctttgcttggtacagttgggcactgccttagaaacaatctccaggtaattttcccaactgcttttgtgaggcccagttttccattttaaaatctaagattacctcagtaatcttgcttttacagcaaatgggcatggagcctgacagatatatttaaactaagttatggacaagctgcctggtgcattaggtagcataggagctaaccttgtgggacatctccccatattcgtaatattcacccctacatctataatcaataaatgcttgtttggaggccatagaaactcttcctgagatctgacctgtgtcttctgctatctgcctgatttctccccatagaacaggaaaacactgtgtaggagatattgtgaatagaaatatgaatataggccgggagtggtggctcacacctgtaatcccagcactttgggaggccaaggcgggtggatcacctgaggtcaggagtttgagaccagcctggccaacatggcgaaaccccgtctctactaaaaatacaaaaattagccacgcatggtggcaggcgcctgtaatcctagatactcaggaggctgaggtaggagaattgcttgaacccagggaggcagaagttgcagtgagtgagatggcaccactgcactccagcctgggcaacagagtgagactctgtctcaaaaaaaataaaataaattacaaaaattagccaggcatggtggtgggcacctgtaatcccagctactcaggagcctgaggcagggacaacggctcaaacctgggaggcagaggttgcagtgaaccgagattgcaccactgcactccagcctgagagacatagcgagactccatctcaaaaaaaaaaaaaaaaaaaaaaaaaagaatataaataggaaatacagtgattcaaataagcaattgttagttcctcagatcagaactgtgagttctatactagactcttacatgttatttcttctggtatcttagcaatgattctgaataaagatcagactccttagtcggcaggtgggacagttctcaataacagaagctgggttctcaggggatcccgtggatatgaggatgaaggttagaagcacttgggaccatacctgcaggtctgatttgaggacaatgagaccaagacaggaaggcagcacctgctgaggggctgggggtgggagaagggaggaaacgggacacaagaaaataagtataaaccaccagactgcagtcagtgatcaacaaaattcccaagtttatattgagaagatttccctggtttggggttttgaagagattatataagggattcgggttgcttgatttttttcattctttttcttttaacttggtctcaatttttttgtaaaaaaaaaaaaaaagaatgtcttatgtgcacctttagaactggtgaatgaatgaacctccctttttaaataactgagattgtcactgaagcactgtcatccgatttaggcttaaaaatctgacactgaatttatcctagatgataaagtgcaagtctcttgtctcctagaaatgatcaggcaaggaaacacccaggaggcccagggcaaaatgccctcctggaagctggtggggtaggaagatgctgaggcccagtatggtccctggagcatgcattctgtgtggtgacagaaattgtttgcttgaccgtacattggtcaggcttctgaaccttctgctaaacccatctgtgcactttttgtaaaattcagttttaggaaattaccctgctaagtcagtttagctggcaggaatccccgtccaccatatactgatcagggtcctcatcccccaccatcccgcagctgatgtcagataaccttggcctgtgctcagcgagaatctcgttaggtcagtttagccagaatcctcccttacccttcatgttccctcatagtcatttcctatctgctaacccccatcctcctccttgagtataattaccacttccttgtgctggattcagagttgagcacaattgctctctctcactgtaagaactacttgcagtgctcctagacctacatatgtgaacctgtttctttaacagtgactcacctgtctttttctcctttcaacttgacactagctgaggcttatccgcatcaaagtggagggactggccccgggggatcctcagggcttcaccttgatggcctgcaggctcacattccactttttctggtgccttctggctccgagtccagtttgccacacaagtgatggaggttggaaggagggatgaggtgacagaggtgaaggagggtaaattcttttctaagccctacttgcctgacatgcatttaggtttttagaaaggaacctgaccccaccctttattttctatctcccacttccatgactagccttacctgtaaaaatggggcatagaagagcccccatctcctagggcagtgtttttgagcagggggtcactgaacagtagcaccttcatctcttgagaccttgttaggaaattctggacttggggtggttgatcatgcctgtaattccagcactttgggaggccgaggctggcagaacatgaggtcaagagatcaagaccatcctggtcaacatggtgaaatcccgtctctactaaaaatacaaaaattagctgggcacggtggtgtgtgcctgtagtcccagctaatggggggctgaggcaggggaatcacttgaacctgggaggcagaggttgcagtgaaccaagatcatgccattgcactccaacctgggtgacagaggaagactctgtctcaaaaaaaaaaaaaaataaaaattcctggaaatggattagcttgctgacaagagttattccattgtgtgtttctacctgcaatacctgaggatgcccattttctcacgatttataaactaactcattttatagatgtaattttcatacatttgggggtatcgttctaacttcattattattacttcaaggtgttattatttccccatcatcatcatggtcattatcataactagttggtgctgacagtagtcaccctgcattgagaactcatactccaggccctttccacatagacttgatttaattccattcactcctcacaacaatcgtctgaaagaaagaatcactaagccattgtataattgaaacacaagaggcgagtgacttgtgtgcccttgggcaggtaatttaaacactctgtgcccccaagttccaatagataaatgtaaataataatatctttcttacctaatacatggggtcaacagttaaagtactgtacatttgtgaggtatttcatggcacctgtgaattgctcatgtgatgacttagtgtgcttccagtgtcagtgtgctgggaaggagacagaataagaagaagactgaaaagatgccgagtctagtgcagggtatcctggggaaaacacctcctgtttgtccaacagcgattggccacacattgaagacacactacctggctgtgaactggggtgaccctgttgaaatcttgtggaaagcttgagatgctccttagagggtgtttatccctcgagctggcacaaatgcggtttgttgttcagtttttccttctactctgcctctatctggtacaaaatggaattgaagaggatataaaccagcaaggaacaatctgaaatcagaatggtgacaatgggagaaagtaatcttggttcaacccaatgttcacctgaagtctctttattaaagactactaacaggaacgaaattgcataataatcttcctatgataatttcaagttccagaatttctctatggaactttcaaatttcacctctgttaactcatggaattttccctagaatctgcaaattaccgaagtctttggaggtttgatgatcactcactggtcagcggtactacaaaaggattctggggagtttgactcagtggtcagcaaaggctcttccgaatcttcagtctgattctgagattccccggggagaactggagcctttcttaacagctgttgattggaaagaccacctgcttcatcctctattgcaacagaaatagccattgtgaatctccatggggaggcacaatgagttttttctagcatgtgtgactcaggtcattttgttccgtggtttccagttgtggggacttggcaaggtcacaccctcccctgagcctcagtttcatcgctcagaaaatgaggataacaattctacttgcctcataggattgttgtgaagattaaatgagacatgtaaacatttgcttatagtaatttcacaccactttattgtggaatcaaagacagaattcttacagaggtcttggttagttaagaaaacatccattcaaagatttgattcacaggacaccctcactgtctttctctctctttttttttttttttttttttttgagacagggtctcacttcattgcccaggctggaatgcagtggtgtgatctcagctcactgcaacctctgcctcccaggctcaagagattctcccacctcagcctccgagtagctgggattacagccatgcactgccactcctggttaatttttgtatattttgtagagacggggttttgtcatggtgcccaggttggtcttgaactcctgggctcaagcaatccacccgcctcagccacccaaagtactgggattacaggcgtgagtcaccacacctggcccttgcttactttcgtacttcccaagaggcaggttaccaaattggtgaaattaaccataacatcattgtgatgggcaagcagatatattaaaagcaaagatacagcaggttaacattaaattttgctcatcccaggacaaacctggccacaggaggcctttgccagtattctgaaaagtgttgtgaccatctcctttaaagctcagttaaaggtttctggctggactccaggctgcttcaagctctttacttgtctttatcattctttaaggagggacccagacacagtatgcagaggcctgaatcctctagatcattctctctccaccatgagtcctgccgtggggacttttccagctccctttggccttatgagccagaaaatcaggctagagcctaaagagaatagaaatttcagaatcaggcttgttctgcgactgtatgggggagctgaaggacacaatgggctttctatattggagactacccatcatactctctctgcccagggagaaaggacagatgctgtgtgattttgtagtctgtgatttggcttctcattctcgctgctctctacacctcattgtttacttcactcccctgaaaaaaatgctccctaacaggctcagtacccaacttctgggtattgctgcccacatttgccttggttctaccttttcagattgcaggatcctgaggttttgcttggagcagctcagattctccactagatctaagatctcacctagtcctgaggatttccttaaagggaaggggaaagatagatagatgatagatagatagatagatagatagatagatagatagatagttgctgcctttgctctacagcatctgcttggtgaagaggctcaggatctggatcctggcctctcagctttcaggaaccccattcccccctgacaggggtggcaagttcatcctattattcattaagaaatttgaaaacaatcattcaggaattttaggtcaagagctggaaaaccccaagcctccgtcacctgagcaaagggagatactgtgagcacctgcaggatacacccatgttccaccacctgcctgaagaagcctgtggttcttgtcagcttctcaagggtgaagtgccaatccttttctgcttgagcagaagagcagaccaaagagctcattgactcaaggagcatcacggcaactgagctgcacctggaagagaagaatccagggtgtgatccacagccaaggcctgaagcaatggggcccatacttggcctctccagggtgagttgtgacccaagtgctgggctttagcccatgagtggtccctcttgccatttccagtttcctcccaaagagaggccagtgttggtgatttcatttcttataatctccttaggagcacaggttttggtttgtgccttttttggatcaggttccctgcattgcagctgctataattaaaactattaacaacaacacagcaccacagaagcaagttagttgctaatggaatttgctgataatgctgtcttctagagaccactctagtaactggagagccttggtgtagagctgatgataaaacctattcctgcttttgtcagtcatgaggagcatttcctttctagacagaggaactgaaacccacatgccagcccaaatttaccaaaagcagtcactggaatactcatcacaccatcatgtctcatcttatccctttcgttaccttcaaatacggccccatttcctcaggaccagaactcccttatgtgggcagcaggactaaggcccttgagttacctgtggtgactcctcattaaatggaggaatgtgccagtattttcagcaaaacatgaatctgatgaaacactgactgaactgtctcctagtttcaaaacaaattattaccactcagggcctctatttagggcaatcagagtcagaagtgggaacgcatcttgtcctcctaccttgattaacagtaactctaattgcaggatgatggtcaaatcctctctcctctaatgtgcagttgtgaaggatttaggctccactgctcatgcatttgggtggggcctgaatcactttcagtctagcacaggcgggtcacttcaggccttcccacctccatcagcatccttcaatcctcccctgacatctctcatttatgcttcctattgattcagaggtcccaacccaagtggctaaaagaaacattcattaacctttctacaaagtcatgaataatccatggattacattgaattcatccctactaaaaccatcttcagaaattcagatgtagtaaccttctttctgaatttttttttttttttttttttttttttgagatggagtcttgctctgtcgcccaggctggagtgcagtggcatgatctcagctcactgcaagctccacctcccgggttcacgacattctcctgcctcagcctcccaagtagctgggactacaggcacccgccaccaggcccggctaattttttgtattttgtttactagagacggggtttcactgtgttagccaggatgatctcgatctcctgacctcatgatccgcccacctcggcctcccaaagtgctgggattacaggcataagctaccgtgcccagccaagtattctatccttaatgaacacatatatgcacattatatctattttttataatatatatatttagaattgaatgtcagagtacatatcagtgttggaggaagagaataaggaggaagcacagaaagtaaaaaggaaaaataggcaccaaaaaagatttggagaatggcagatggccaaggagatgcagttgggaagtgcctcttccatggagaggaacccaaatatctagtaaaccttcacattttaaacagatcttttgagagaaaacactgaaagttgacacagaggtgacacagacaccatggttgaagagggaagaaatgggacagtctgctcagagtcactagacatcaggactggcccatataccctgaacaaacccaaggaaggggtgagtgaaggaaccctgggacactacatacccataatgtacctctgagatcctagttacaggagtttctacgaccctcatagatctttggactggtaggagagctgcctcgagcacatgcagaggcacagtttgaacccacacagagcccagaaggctttgttgtgctgtgcagctgcagcaaaatgcaaccctaggtgcccatcccacaagcctccatttcatactgagtggctaagttcctgctgtccgccaggctgggagtgaaccgcgcctggcctgctcacatgcccaagataggccccatcaccagtgctgtgtgattaagttgcatctggtccacatgcccccttgcctgtcaaccccttcccagagctcatgcctggtcacgcctgcaagagggtgtccacagcacagcatccactgcatagcttgagtgttttgttgacagcctgggaaaagctcaccaccctgtccccaagtcacagccagtgcttgaagcttagaggccagaggacaaatccgtgagcccagtcccaactccccaagactcaagtataccacccagggacactgagctgagatttgtaacctaatctcaagtgaaggaggatcctccatagtcagaatgcagagaagggtgtggtatgggttctcatgggggcatgggagctggacacccctccctttgcaagaccagaccatgaagggtatggcctgatggtggtagcttctttcccagggagtgtcctggcacagaatgcctggagcagctcaacaatgtgggagcagatggcttggggaaagcctagttggttgggcttgccgccagggcgagtgtctgtgggagatctgctgggtcaggggagtgtaagctaggcagactccatggttgcctgctgggctgaaaatcatgggctgcagactccatactggtgttgcacccattgtgccactgccctgcctggagatcctctacccttgaaatactgcatcatcagagcaactgcagacataccctaaaacctgctctgactttggtaagcacagtggactggtgggtctctggagagctgtgtgtccctagagatgtaatcctcagtgtggaccatccctaagggaagggggagtgcagcctgccaaagcaccacatgagacaaagaaaatgtggccatggcataagccactgaaaggagcaccaccaaggcccagaaccagacttggagaaggaattatgtctcgcctccatctcccctccccagtgcactgttgcagatgcaacaatagctcttcccataggggcccagaaagcgtgcactgaaagaagttgtttctcatgattctccagtgagggcaagcatgcaccaagaccccacctgccagctcttactcttaagtccatctaccagactgaagtttgagttataccatcatataaaaatacattgctaaaacaagcaacatctgtgaaagccactgcagcaacctatctgtaaccaaggaacatatatggaaacttcaccctctgcaactacagagaaatgaagccaatcaatcacatacaccactgtcatactttcaaagagaataaaaaatataaaagccctgtgatggttaatactgagtgtcaacttgattgtattaaagggtgcaaaatattgttcccgggtgtgtttggagggtgttgccaaaggagattaacatttgagtctggactaggagaggcagaaccaccctcaatctgggtgggcaccatctaatcagctgccagcacggctaggacaaagcaggcaggagaaggcagaagagcagacttgctgagtctcctggctttcatctttatcctgtgctggatgcttccagttcttcagcttttggactcttggacttacaccagtggtttgccaggggctctcaggccttcagccacagactgaaggctgcactgtcagcttccctacttttgaggttttgggactcggactggcttccctgctcctcagcttgcagatggtttattgtgggactttaccttgtgatcgtgtgagtcaatgatccttaataaactccccttcaaatgtacatctatcctattacttcggtacctatagagaactctgactaatacaaaccccatctaaatgaagcaaattcaaaaaagaagtgtcaactcccgcagatggaaaggaataagcacaagaagtctggcaatacacaaagccagagtgttttgtgatctccaaagcctctcactagctccctaggaaaggatcctgaccagatgtaaatgtctgaaatgagacacatagaactcagaagatggatgtcaaggaaagtcaatgagacataagacaaaatagaaatccaatgcaaagaaaccagaaaaacagtccaagatttgaaagacaacatagttatattaagaaagagccaaactgaacttctggaactgaaaaattcactaaataaatttcaaaatatagttgggagacttaaaaacagactaggccaagcagaaggaaacacttcaaagcttgaagactgattcttcaaattaacccagtcatgcaaaaataaagaaaaaatattttttaaaaagacaaagccttcaagaaatatgggattatgtaaagaaaccacttctacaacttattggtattcctgagagaaaagaaagagtaaccaacttggaaaacatatctgaggaaaaaattcaagaaaatattctcaattttgctagagatgttgacatgcatacaccagaaatccagagaacctctgttatacactataaagacagccatccccaagacacatagtcgttagactatccaaggttaacacaaaagaaaaaacaaatctcagacacagctagagaaaagagcaacactacctacaaagggaacccatcagactaacagtggacttctcagaagaaaccttacaatccagcagagattagaggtctatttttagtactctaaaaggaatgacattccagcataaacattcatattcttcaaaactaagcttcataaacgaaggagagattgagtctttctgagtcaagcaatcggtaagggaatttatcaccactagactagccctgcagaaatgcttaagggagttctaaatgtggacatgaaagaacaatacacagaaaaagcacagttaagtacatagtccacagactctataaagcaactacacaattgagactgcaaagaaactagctaacaaaactatgacaggaacacaatctcacatatcaatgttaaccttgaacataaatggcctaaatcctccgcttaaaagacatacagtggcgaattggaataaaaaaatcagaatcacccatctgctgtcttcaagagacccatctcacaactaatgacactcatgggttcaaagtaaagggatagagaaagattaatcatgcaaatggaaaacataaaagagcaggagtttctattctcatatcagagaaaacagatcttcagccaaaaacagaaacaaggacaaaaaaatgttattgcttaatgacaaagggctcaattcaataagaataattaactatcttaaataaatatgcacccaatattaattggagcatcacgatacataaagaaatcactactagacctaagaggtagacagcccctcagtaataactgggaacttcaacactccactgacagtggtagatagattattgaggcagaaatctaaacaaataaattctggacttaaatttgccacttgaccaattgaacctaatagacatctacagaacactctacccaacaaccacaatatatatatttttttctcatcttcacatggaacatactctaagagtgatcacatatgcagttataaagcaagtgtcaagaaataaaaacaatcaaataatatcaagcatcttcttggaccgcagtagaataaaaataaaaatcaatagcaagaggaactctaaaacacagacactcacacacaaacacacacggaaactaaagaaattactcttgaatgacttttgtttgggtaaacaataaaattaaagcagaaatcaaagaattttttaaacaaatgaaaatagagacacaatgaacaaaaacctctgggatgcaataatagcagtttaaaaaggaaagattatagtgctaaatacctacatcaaaaagatagaaatatctcaaattaacaatctaacattgcacccagagcaagtagtaaaacaagaaaaaaaactacatccaaatatagcataagaaaagaaataacaaaaataagaacaggactgaataaaatcgagactcaaaaatccacacaaaggatcaacaaaatgaaaagttggttctttgaaagtgtaaccaaaattgatagactgcaagcaagattaacaaaaaagaaaagatccaaataagcacaatcagcaataacaaaggcgacattcaatcgagtcccacggagattcaaaagattctcagagactactatgaacatttctatgtgcacaactagataacctagaagaaatgaatacgttcctggaaacacacaacttcccaagattgaaccaggaagaacctgaaacactgaacagaccaacaatgaattacagaatgaattgaataagtaatagaagcctaggactagatgaattcatagctgaattctaccagacatacaaaggggagctcatgccaatcctactgaaactattccaaaaaatcgaggatgagagattctcctctaacttactctacaaaacctatatcatcctgataccaaaatatggcaaatactcacacaaaaaacaaaaccctaggccaatatatctgatgaacatagatgaaaaaatcctcaacaaagtacttgcaaaccacattcagcagcacatcaaaaagataatacaatatcaagtgaactttatacctgggatgtaagagttgttcaaatatatgcaaatcagttaatgtgattcaccacataaacagaatttaaaatgaaaaaaaacataagattatctcaacagatgcaggtaaaacatttgataaagtccaacatgccttcataattaaaaccctcaatagactaggcattcaaagaacatacctaaaataataagaaccatctattgacaaacctagtctacgttatactaaacaggcaaaagttggaagaattcccataagaataagaacaagacaagaatatccactttcaccactcttattcaacttaatactggaagccctagccagaatgatcagacaaaagcaagaaacaaaaggcatccaaataggaaaagaggaaattaaattttatttcttcactgatgataggattctatacctagaaaaccctaatgattctgaccaaagactcctagagttgattaaaaatttcagtaaagttttaagataagaaatcaatatacaaaaagcagtagtatttctatacaatgcaatattcaaactgagaaccaaatcaagaacacaatcccatttacaagagccacagaaaaaaaaaaaaaaaagaaatacttaggaatacctctatccaaggaggtaaaagatctctttaagtagaactacaaaacactgctgaatgaaatcatagatgacacaaacaaatggaaaaatattacatgcttatggattggaagaatcaacatcattaaaatgtctttactgcccaaagcaatctacaaattcaatgcagttcctatcaaactgccaaagttatttttacacagaattagaaaatcaattctaaaatttgtatttaactaaaaaagagcctgaatagccaaagcaatcttaagctaaaagaacaaaggcaggggcaacacattacctgacttcaaactatactacaaggctacaataaccaaaatagcatggtttgggtacaaaaacagacacatagaccaatggaacaaaatagagaatccagaaatgaagtcccatacctacaaccaactgatctttaacaaaattgataaaaatacaatggggcaaggataccctattcaattaatggtgctgggaaaactggctaaccatattcagaagaatgaaattagactcctgtctctcaccatataaaaaaattaactcaagattgattaaagacttaaatgtaaaactttagactataagaagcctagaattagacctaagaagctcttttggatattggcctatgcaaagaatttatgactaagtactaaaacacaaaagcaacaaaaacaaaagttgacaagtgagaccaaattaaactaaagagcttctgcacacttgcatgttatattgcaaatatgaaatagcaaagacatggaatcaacattggtttccaacaatggtggattggataaagaaactatgatgcatatacaccatggaatactatgtagccagaagaaagaatgaaatcctttcctttgcagtaacatagatgtgcctggatgccatcatcctaaatgaattaagatgtaaacagaaaaccaaataccgcatgtcctcacttataggtgagagctaaactttgggtacacaggagcaaaaggatggaaataacagacactggggactccaaaacaggggaaggaaggaaggcaaggtttgaaaagctacttattgggtactatgtttactattcagataatatgttcaatagaagcccaaacctcagcatcatgcaatatattcatgtaacaaatgtacacatgcatgcttaatctaaaataaatattaaataatcaaataaaatgaataaaacggtagatatgattatgtggaaaatgctttactatttattatgtggtgaataatttaataatatttaataaatacatgaatgaaaaatagctacaactgtgtgttaggatttcaataattttttatttcattcctataacttttatgtattattatatacataataatatatagttaataataacaaaaacaacatggtattgaaataatttccacccagaaggaggatcaacatatttaagtgactacactactcaagataaaaatcatttatcaaacagatcaaagtcatttacctgctttcctttttataggtcctaggaacacacgtgccatagacaataaaacatcacttcccccatcccactaccttggactttatttaacatctttgggtagaacagaaactgttgataaggtgagttttgttttatagacaagagaggaaaatggatactttgtgtggtctgggccttagaaacagactaagatcttttttttttctcttttgctttttttactagcataaaatattaattgacaaaacactgaatacaagcttcactatcataaaatcaaaacatttaagcaatattccaaaaaagatttgacaaaaactagtcaccaagagtacaaaaattacacatcaacacaaagcataaaaaatgtgaactttcaaattaaacagtcaaaaacatgtacctgcgtgatcacctccacaccttgactgccttcgtctgcagcacgctgctggtaaaggctgggtggctgcaccgtcgtcccctaacccaacattgctttcatctgggaaaattcgcttgatagccaattaagccatggaggctattacatttacacggggctacgcacaatctcaggggacgttcaaacagcagttcgttcctcacacgcactgttgggtgcaaagggcacctggagagtgagggagacctgggagctttcctgcggggccttggccacgcggccgtcgccggcaccctgtcccttgcctggcaggggacacaatatttgtacagattatggtataatttgaatgattttctaatctacttatcttaatttatatagtttatttaaatgtcaaggcagagaaatacattgatcatgttaaggtcacgtgatgtggtggcgcagtaatgacttcctgaggaaacagaaatcggatgttttgtgatttagctatgtgcactaaacttattttccatgttttgagagcacattaaacattcacgtacaatgtgggaataggctggctcgtaaccaaaacgtccaacccaatgccaccctttgaatcgctgtgaacaccatcctattgcggttcagagaaaacaagcaaggctgcgaagccccggggttcaggcagctgcagcgcttgggccaaggtagctccgctctctggtctgaagccacgtggccccaccccggggcggcctggcttttttatagtgcttattgctgtgtttggcatgccattcaacccatcgggatgttggatagtgacttgagagcaatccctagatttgccctgtcgggatgttgcatactgaattcggaataagccctgctcaactgaggcactatcactaggaggaggcactgattcccgcctttcaatgctatctattggtgaaagaggagttggatggcatctgggaaattagtatcacttctactttttcttcttttcttttaaaggttaaaaataccttgtattagttaatactgctataaaatatgaatatccaaatctctgtggctcagtaaaatagatttttttttcactcagagaaagttcaggttcacccttagtaacccaggctgacagagactcttccattttctatacatagcttccccaattgcccagagaagagtggaaagatttgataggtgactgtacacaagaataagaacttagtacctagtcactaatttactcgttgaataaacatttatggagctgaacatattaatcactgggcagacgctgggacacaagaaaaatctttaagatatgtcactgcttattaccaataatgttctagtgagtaacaagagttaataacacgactaattatagtattgtaaatataattacagttccaataagacatacacacacacagaacgattttgtctggttgttgaggaaatctttattgatttaagatatcttttgatgaacaggatttttcaataactatcagaaaaagaatgtctatgacttatttttaaaaactattttcttatctgccttgcatatctgacactttcatctcctatcttccttgaatacaatatagaacctgacatttctttcctttcaaagatccttagagcatttcctacatttaatctgaatgtctttctcagtaatttttcccatacaagcaattatggctacattttcttaatataatcatgaaaaggtgagcaaaactgaaaatttaatttggagaatagatacgaaacattcaattaattcaagttgttgttaggctgcatatgttcagctttcagtgaagatgaacaaatgatgataaatgagaaactgaaagaaaacaaaccaataggtgttttttaagaaacaatattattaaagtgcatgtgttttctactgaatgaaagcaacatagaccttttcctcacattggtagttagtaagatgtataaaaacaactttgtaaagaacaattaatacaggttaatgaatcattgtgaaaaggggataacacactttattgtagcaatgatctgcaaggtgttaaatgttaaaaaagatgaagaacaattgagtagttatttgatcacagtgtttattaaattgcttttcctgtatctggcaagctttacagaaatgtcttcaacagaataactgtgttaaaagccaaatgaaatgcattttgaaatatgattcttcacttggtgtgcaggtataatctcaggtgtaattcagacaagagacaaattcaattttaaagttccatttgttacaatttgatgattgtgattaaagaaccataaaaattttatctttgacatttcattttttcctcacaaaagtattctactgcaattttcttagttttctttcctcttaactgtggtgttacctataaatgctggatttctctgttttacgtgcaacaaatctacaatcaactatttctggaacgccacttcattttaacaacaaggacccataaatattttaaaaattcaaaatgttatatataaaatgttaaatgatacacataatacatttctaagtagtaattatgattatgcccataattatacccataatttaaaaatatgttacctgaagtaaattattatacgttttatgttggaagtgttcatttatctttgatctctgttaacacattgtactatgtggtaataatataaactgccttactggatagtgatgtatctttggtttcatattgttactggactaatattccaacactatagatagtgaaatttaacattgaaacaatttgataatgccatcaatgaatccagtttttaagagtgggatccattttctaaaattgagtatatagatacttcatgagatatcttatcatgcatcctaaaccaaaccaacctcttcccctgactgtcttacagtgtattattattattttatccaccacagcaactagtacatttttcagaacctagtagatattcagtcattgtctatggaatacatgaacacattctgaatttggacagtcatcattcttggtgttttaaaacaaacacttcctgaattgcatccactattttctaagaagccctaggaattcattgaaggagggtatgggtaagttgtgggtgaaactgtaaagatgtaggtcctcctcccaaaacttcttcagcgtatcttcattgctgtttgtttgcttgcttgcttgcttattttaaaagagatctagatatagtctaataagaattgtataaatgtgatgttccacaatgattctaacttacatggtgcaaaataataaaatattacattctacctgtttgtagaaaaccatggatactataaaggatctagattttctctctcctttccttctaagatttattcactcagcaaagacttacctggtgactacttagtgctagacactgttttagatacttgggctataacagtgaaaagaacagtaattgaattaatgaaaagttcattttaattagctgtatggtaaaataggaaactaacaaaaataaaatataacatgtcaaatggcaatgactgctctgagaaaaataaaggagaataagagattctaaattattatatacggccaatattaccaacatattatagaaagaaatgagttcataatgtttatcagagaattccatgaaaatagctaaatttttctagaaagccaggcactgataagagaataaacaaacagataaccgattttaatttgatcttctcttacaggtgcagctatgatctgccattgtatataatataaaattgaaaattgtttatatttcattcacgttagcatataatgttcttacttttttttttttttgagacggagtcttgctctgtcacctaggttgaagcacagtggcacggtctcagctcactacaacctccacttcccgggttcaagtgattctcctgctccagcctcccaagtagctgggactacaggcaggcaccaccacgcctggctaatttttgtattttattagagacggggtttcaccaaattggccaggctggttttgaactcctgacctcagatgatctgcctgtgcctcggactccaatagtgctgggattacaggcgtgagccacagtgcccggccaacgtttttacatttaaatatcagacatctatcatattcctttctccctactacaaacattgtatgcttttcaataggcataagattttgttttcactcaggttggattcaacaggtattatttagcagttcattgcatctatccatttacccaatagaggaagtatacaagatacaaatgaataaagtgtaataattcttatactatttgcccttatgtcatgtaactgctccatgtttgtattccgaaaacctaactgggagggaaaactcagaaaaatagaataaaaagtattatatatctcatacatcctcatttttgaatattctaggggtacagatcagtataaataaaatactctggtaagtgaccaccacatcatctgtttgtcattcttagacccagagtataccattcttttaagaaagaaaacttgctactgtacctcctacccagtaacatatatatcacatatcatatatatatcataacatatatatcatatatcatatatacacatatcatatatctcatatatataacatatttgctactggttaggagtaacactcagaaaattatacttaataatgtagtacaattaggtataaattcacttagtatttttaaattttacgtatattcctatttatatgaatcgtcatttaaaatcacatctactgatcctgatagcattaaaggcataagaggtactgaggatattaatttaattttgtttacagctatgcacagatatttttagttcactgagatttaatccagtagtctattatttgattaattgtacagctatcaaatcattcaggactcccactgtttcaacaacgagagtggaaaaatattttttcatttatgtttatatgcagctatttgtagtctaaattaatatcctagcaattgatggtgaaattaaaattatttctgtcagatgtggtaatttgatgacagtggataagcatgggaataaaagaaagttttgaggaagaggggacagtttttgtttacttaatgattattccaaagatgttaagtaaacattctatagaatgcaacatatagtggaatacagcattgaaacaatttaataatgtagtcaatgaatccagtttttagaaatgggatccattttctaaaactgagcatacagatacttcatgagatgctttatcacgcatcctaaaccaaaccaactccttcccttgactgtcttgcagtgcatagggcatctctacactctaggaaaggaattatcaatctgtttatatgccacttataaaatcatacttaatgtacgattaggcataaatttacttgcatttttaaattttgtaaaatgttaatggaaagtgttcttgaaaaacatttctgagaattccaaaaaatgaacaaattttaatacataagggacaatatctttctagtgaattgattatcagagtgtaatgtggtatgttctgattatgttacataatattctgattagcagaaaattttgaataagtgaatttagcaaaatgtttagaggtcaagaaaactgttttagactgactatgttttctgacccaaatgtaagaaagaacccaataaaaagaggcagccagataatgctgttgtttgcaaacttaaacagaagcttgcatgtaatttatgactcaaagaaaaataaaaatagaagttatactttatttagaacttaatgacagtgaaaaattgcacataaaaaggaagactgttgaatacagcaaaagctggaattatataagaaatataaacataaacacacaaaataagtgtaaattataatgaagtaaaaatatatcaaagagaaagaaggaagcagtacaataaaaaataaagttgattctttaaaaaccatacttaaatagacaaatttccagccagattgtttaccaagtaaagagaaaaagaaggagatagatcaaaagacacaagatgatgatgaaaagagggtcagcacttataaacatagtagaaatttaagccataatgagcacaagaaagcattatcaacttacttttgaatatataaaatagacacttaaaaaactgaacaaaaatgacttactagttttaaaagaaaaaaaaaaaaacatcaaacatctatccttccaaaagtatagacttcaaaagtatagtcccagatgggtgaacataaaccacactttaagcaagaactctcagttataaccacatgggtgaacataaaccacactttaagcaagaactctcagttataaccagatgggtgaacataaaccacactttaagcaagaactctcagttataaccagatgggtgaacataaaccacactttaagcaagaactctcagttataaccacatgggtgaacataaaccacactttaagcaagaactctcagttataaccagatgggtgaacataaaccacactttaagcaagaactctcagttataaccagatgggtgaacataaaccacactttaagcaagaactctcagttataactgcttgcagttttagaggatcccagccacactcctgaaccagagcttggcactgggtattccctctggaacacccttttatttccttctctaagcaaagacatggaatcaacctaaatgcccatcagtggtctgctggataaagaaaatgtggtatataaacaccatggaatactatgcagacataaaaaaagaacaagatcttgttctttgaagggatgtggatgtagttagagaccattatccttagcaaactaacacaggaacagaagatcaaacactgcatgttctcactcataggtgggagctaaatgatgagaacacacggacacatagagtgggggacaacacacactggggccttttggagggtggagaattggaggagggagaagatacaaaagaataactagtggttactaggcttaatactggggtgatgaaataatctgtacaacaaaccaccatgatacaagtttacctatgtaatgaacctgcacttgtacccctgaacttaaaagttaaaaatgaatgaagcctgtcagaaccacccatttagcagtctaacattttccctagtattcccaaatccctttgcctagccaacatttttcacagcactttttgtcttcaaactactggcctgaagcaatctggcttagctttctgagtagctggaattgcaggtgtaccagtgtgcccagccacagttttttcaagacctgtttaagacaacaggttagagaaaatcaagataatattttgagggggaagaaggtaaaatcaattaagacagggtgcacagagtacttgaatggtacagataatgtttatcctttgtactaaatggtgtgtatgtgggaattggttatattattttgactgtttgtagtcatattatatacatatgtgtataaataaaaataaaagaaaaaatataagctaaatttatagatatattaattttatttaaatataacaaagatttgccagtattcaaatgtctgcaatgattcttaaaatgcacagaacctgtgtttaggtacagtatcactgttcatccagccttcattcactcgaatctactcttacctaaaatttgtaccgtaagtaaaattacattctgtatgacagaaagcaaattacaatattagaacaacattatggaaaattggcataacattgtacaatcatccattactttattatttatcattttgcaaatttttattatattagtaaaaaagtctaactgtacttaatagctaatacatatattatttgatatttttaaagaccattattaaaataataataatttgggggtgagaaggcctattgaaaaatgaccaacgtggaaatcataaataagtttgatgcaacaaatatttgtgagtcttatagttaaaaatgtaaaaattcattataaacaaagctaaaagacaataatatgcattgggaaatatttgcaacatttacttcaaaggtggatgtccttaagagaatttttacaaattaataaacatttaaaaaggtgaggagtggcaatagctatgagagacaatttacaaaaacataaaaaatatgaaaactgtttaatctgtaagtacatcaataaaaattttattattgtagttattttatctattaaattaggaaaggtcaatacaattggtaatcttccaagtaaatataggggagaaggtctttctcatacacttataagaatattattttgttagaatgcaattaaataaacacttggtaaaaatccatatcctttgtccaaacaatttaagttctagacctctagaatccacatgtacatatacatatatacatacatatacacacacacattcacacctatatattaacaactcaaatccaactccaactcttttgtaagtagtattttgtccaacaaataaatttatctcaaattcttcttgacttttctccattatagagccagcaattctacgtgtaactctacctctaattcctttatttgcatttatttctgctttcaaacccttatatgaggcaagtgggattaatttatttcattaccttaactagattcatcgctttactttgtcaaactctgattgatttgctcaactcaatcttatgtgttcaagaacttaatgtggattcctgttccaccttatgaaagtcttttccaaaaacttgctaaattcttgactcaagacattgcagtcagtaatgcatttctctcctcaaatacaatggaactgtgttctaataaatactcttcaacaatgtgcagttatttctccacaactatcaattccccttaaagcagaattttactaaaaatggctttatccttctggggataatcagtaaaatggcaattggtgggtgaattaaaaatatactaaaagcagatggcagaacatgagtgcagatttttactacaaagcttaggaaaagcaaaaggaacttgaatagagaaaatgcagaaaagccctcctttggctattaggacggagagagcagaagtatgtttagagcttcaaagagtctgactctttgcaactgtttatcttaggactttaaggaagtaaaaggtgcaagtgaaacactctggattataaaatagaatctgacacagaggattcaacccagttaatatgcatgttgcttacatggaaatgctgagaaatttttagcaaatagatagaaaatgacagatggtaggtatatagaaaataattgtaggaaaaaatgtaaaatgaagatttatggtattccttttatattttattttgttaatatgttgcccataatgctttatttcaaagaatgcaaaaccaaaaaagtagtcccttcctaacttcccctgcagccttgtcttgtggagcttgtattttacttcatgagaaatgccaaggagatgtcatttaagctgaaaacctccagcagaattagccacaatatttgggaaaaagatgtttccagaaaaagaaagagctagtataaatgtccttaggcaagaaagagctcacgatgattgaggaacaacaacaaaaaagattatttcactcaagaaaagtgaattgggagtacagatacaaatgatgaggtctgaatatgattcatggggcaggtcacactaggttgtttgggtatggtctaaatgaatgcgcggcatgagttgctttaaggagaggagtgacatgatttgacaagttcttaagagatccctttgattactctggggagaatagaacataaagtagcagaaatgaaagcaaagggagatagtaggaaataattgcacatttataagcaagaaatgatgttggcttggactctggttatagcaacaaataaagaaaaaaggaaatactgagaagagttgattggatttgctgacattctcaacataaatggaagtcagtatttttttctaataaatataatatgcgtaaatatttttaaatatttaattcttttaccactaatggggcacgagtagacttcagggaacatgccagtacagaaccatataaatgtgatcattggtagagataggaattaataggcatttgaatgtctccctcaacctggaataccacaaataaagctctttgcttttcatgttgcattgttatcataccctatagttttctgccattttcagttacttaatattatgttttgcctcaatagattatagtgctttctcttgttgtgttatatttgcagcaattattagtgaagttttaaacttcaatatcacatctaaaacagagcaaaattgttgcatactattttccattaaaacatgagaccactatgacaaaaaaagctaaacatgtcatgaaatgacttacattggatgaaagtatatgcaatatattaagaaataatctctgactttatagttttttatttgtagtttttactagaacgtgaaatcaatatgtgaaccctggctggagtttgcatctaaatgtaataaaataaaagaaactttaatattatcattgaagcattaatgtacattagcgagctggactatataaaataaactttattatatttagcatttgatttttatttatgtatattataaaatgaatatagtttatattataataaaaataaaagaagtagtatgttaactaattagtataagatgcctacaaactacatatctgcctaaatttttgacccatgaaacttcaatgatttgtgttaatgttaaggcctacatttatttatatatatatataattaggggaggaattgttaattctttcattttaaaaattttaactttgcagacaaagttgactatacctgtggcagaacactgcaacagctataaataaataaataaataaataacttttattttctgtggagctcccagaattatgaattattctgtagattgagatttgccaaggtccttttcttagagttgcaagagcataggagaaagtcaagggaaataataagcagcacttgatttcctttaccacagtggatgggcttctaaaaccaaattacctgactataaatccagatctatcttctgcaggctatgtgattgtggatgttacctcttctgtgcttcaatttcctcatctgtaaaatggaattatagcctaccctattttgtagtatagtgaggataaatagaatgaatgtatgtagttcttagaatagagcatggcacgtgataagtggtcaataaaatattgtttactactagttatgtaacagtcacttcacacataataatgatttaataaaggaataagaagaatgtagagcacagcttctcaacattggcactatgacattttgggtcagacaattatttaatgcagagggggctataggatgcttagcagtgtctctggccagtagtgtacctcctcctctccaagttttgacaatcacaaaggcttctagacattgacaactatcccctgaaaagtaaaattgtccctgcttgagaacacaaatataaagtaaccactcaaagattacattactaattttaattgaatttgaccagcattatgaaataagcataagcttaagtttctacccttgattttgtcattgtcagttagggcagcagagaactccaattctgaaaattctgaacatgtgctaataccctacaatataatcaaaactttcatttttgaattgtatttcttaaaaattagaaaatttattaagcagcaacatggaataattaaccacaaaaatgttgaacataaatctcatttgcctaagttctcttttgaagtcctgtttcactatataagtattatgtgttttgtttcacagctagataacagccagttttttctctgagcctaaggttgcttctcaaatttatggtggcttatagctcttctaagtttctataaaacttcagcaacctgcagcaggttgaaatttattgatattgagttattcaccaggtcatattacaaagtcagggactgactcacccaaaccagatgctccccctgccaccagatcactaggagatattgcaatcatttcccctggctactaaattagcaaaaattctcagggagagagaagggcaagatggcacagtttaatacttactattattcttttattctttatcatcattccctttgaatggattaagaatctgacataaatataacttgctaaagaaagggtgttaggtgagagggaagtcatattggtctaagaaaagtcttagagaaatatttgaaaagaggtagagagaagggttggattggagtgggtgggtggggaatcacactaaggagatggatcattcataatttctttagacatggtgaggcagccacaggagtctgaacttgttgaaaccctagtctgaagccaataaaagtgctcaataaggtcacactttgatcttctctgcctaaagcagttattcaccctatctttgggagaggaaacatctacaaacctttgttctctttgttagcagagggatgacatgaatttgggaaaaacgtttgagagacaaaatgagatttagctcgagcaagtgatcgacttgtgctgggttgcaaatggactttttcaacaggcaggttgaaactgtgcttcagcaattaggataccagatataaacatccatgcacagaattggaaaggttcagctttcatggttgctatggtttgaatgttccctccaaaactcatgttgaaacttaatccaaaatatgacaatatagagaacgagctttttaaagaggggattggatcatgaaagttcttccctcatgagtggattaatccattgataagtcagtggattaataggttatcttgggagggaaaccattagatttataagaaggggaagatagacctgagctagcatgttagcatactcagccctcttgccatatgataccctgtgctaccttgggactcttctgagagtccccacaagcaagaaggctctcaaaagatatgccccatcgaccttggatttccaagccttcttagctgtagaaaataaattcagttctttgtaaattactcagttttaggtatactgctataagcaacagaaaatggactaagacaatggtcttatccagaactttgtaaactagaattggctgtttagattcagtatgtattttttttatagattcaaaataattttgttttgaactgtacaatgaaggagtgtcataagcttttccacatgtagaggctctaaatatcagtctggcattgtgataaagcagagagtttaaacccaatcctatttgtgccccatgaccgttctttctggttacagttcagaaaagtaggaatggatgtgtaactcaaggagaagcatataatacatgaagctttttctcaaaattttgatttagaaaatgaggtattttagtatgttaattataggcatctcaactgagaagtctaatagcattgggccagaattgtcgcagcagtccaaagccatggataaacttaagttaaagggagcaaatactaacagccttccaaattaatctgtattggagaagatgataaacagatgaatgggaactagaaaccatgcagacttggaactagatataaaacaaacagctatctaatgatttcttatttactctgagcccaagatatttttgtatccttttagttaaacctctgttttactaaggaaatttaaataagattctgtctcttgcaagaaaataacatctaagacatcttcgtatttaatactgccttaattttgtttactccagtggtccccaacctctttggtaccagggattcgtttcgtggaagacaatatttccatggacagggttggggggaaggtttcgggataaaactgctccactactcagatcatcaagcactagattctcacaaggatcaaactagatcacttgcatgcgcagttcacagtagagctggtgcttctgtgagaatcaaatgctgccaatgatctgataggaggctgagctcaggagtaatgctcactcatccacctctcccattctgctgtgtggcccagttcctaacaggcccggtaccagtttgtggcccaggggttgggacccctgttttacactataacatttccacacgtctctcatggcctttcagatccactgcttgtctcaactcaagtccagctacctgaaaattcgattattttttcaaagtgaatttgaatatctttatgttgaatacacagtctccacttttacgcagcccctactgtcttctatcatacctctctagccctggaagagatcaactttacattcacttttcctgttttagggctattattttatcttcaattaccaaaatctatctacatttagatactttaacttgcaaatacatagtaaacaattacagattatttaaaatagcagttttcccatgagtataaaaaaaaagaacaataaaagcaatatttgttgagtattttaaagtgccaggcactgagcagtgtgctttgcttaagtaaatgtttgacaaaataaaaggtcctttaaaagttccatgctttaacattaataaccatataaagataaggttagacttcctatcaaattagcagttttgtgaagataggccttttctgctatatagaatctcctcaaacctgagtgttcgtattatggattatctagtatactccatagctatcaagtttgtgtatgtttctttctcaagcaagttatcttatttctccttatttcttcagacttatcctttcttttcttttcttttcttttttctttttttttgagacagagttgcactcttgttgcctaggctggagtgcaatggcatgatctcggctcatcacaacctctgcctcccgggttcaagtgattctcctgcctcagcctcccgagtagctgggattacgggtatgtgccaccacgtccagctaattttgtatttttagtagagacggggtttctccatgttggtcaggctagtctcgaactccgcccgcctcagcctcccaaagtgctgggattacaggcatgagccaccgagcctggcccctaacctctcatttctaaggaaatgacaaattaagtcttttatgcaaatacagtgtagggtcatttaaaaatattttttgtaataggtgtctctgtacataaatctatttaattttttctcttttacagtaaaaaaggcaatactgtgttttagtttcaccaaaaatttcagtagaccaattgtgtaaagggatacatttatatgaatttttttgacatagtaaaaactaagaggggaagttattcaaatatttcagcataaattccctttccttgaaattgcaatcgtcatgtgtagctacaattcctcagcattcctctgtagtataagtagctacaattcctcagtataagaaacactaaggtggaaaattaattgttaagagaacaaagtcataacaaaacaacaaaacaaaaaagtaggatatagaaacattaactcaatatcactcttgaagctcacataagagaaattattgtactagacactgtggttcatcatccagaccccatcttcatgggaagacatcgatcccacactcatggggaacatcagcagctgacaattcacacctgtacctttcactaaatattgtcctaagacaaactaaaatgaactaactcgcccaaagtggtgcctcctttcagagagcagccattgacccatggctggctaatgtagttatacaaacatgcaactgctttgcatcaatttgggacaactctgaaagaggcccagtaggattggctgaagactcagttcaaagttgtcaaataaagcacaccatgcccagctgaatttacattgtttactatgagtatatcccacgaaatatttaggaattacatatactaaacattattcatgatttatatgaaatttaaattcaactgggcaacttgtacttttacttggtaaatctgggagcttttccttagttgcatctgcatggcaggtaagcatgtcggtatgcccagacctcccttctttgcttccttataagtgcgtcccagaaaacaagcaatcatctcagagccaataggcattgaggcttttgataatcaaactcccaaaggtcaaggaaaaagagagtatcccaaaagcaccaagagaacaaacaaacacataacatacaatggagcttcagtatatctggcagcagacttttcagtggaaaccttacagccaggagagggtgacatgacacatttgaagtgctgtttatgggtcccttcggattgtaacggggaaaacaagaattgtagcaggaagaattaaaagaaaagagagaagctttttttttttttaataatctgatctttttctattgagaggcaggcacccaaatgctgcttctgtcggggagtgaatctgtaaattctttgtaactctgtgctacctatttgttaacctgtgtaatttgttctcctgctgacttcttgcaaacacttgccagtgggtatctgaagcctcttacatcttctgtggcacggacttggcctatatttagcatattcactcatctaaagtgggaagaagaatctggcatcttttctctttctccatcttgccatcaaaagctgcctcaatgagcatgtagccttcagaattttgaaagcaagaagcaggcaacaactggccatgtttagcttcatcttgaaactcttgaggacacctatcaaactttcccaaaactgtctcatcatgtatggttccattgcaggatgggtgcaatgctgagtgccagaaggagagggatatcccattctttccttcttaaaaattgctcccagtctttttgagctctcttcctgtttggaaggagaactaaagcaagtttagttctccttacaaaagagaaaataattaaaagcactctcacttaggtaactaattcactttctatatgataattcttagaatgtctagtcctctctttacataagagtacaggtaattgaggtcagtgaaggttttagttacagaactggtctggctactttttattaaaacctgcaaagacttaactgttcttctataatttagggatactcatcatttaatagggaataaacaaaaatttgagacaaaaggaaattctgtatccatttcatatatatacatgtaaattacatatagaaaaaatggtttagaagaggagttaatatcaatttaaaaacgggaattttaaagctgggaataatacatagcataaatatgtataaggattcagcaaaatgttagttgaaacagggggctaaataaacttgaagtttaagaaagttaagaaatgaacccaaatatgcataaatctgaggacaaaatttgatattgctgctaataaaaaagggaggggcatcatattgggaggcttcattaataaaagtaacaaattatgagaacaaatagtcttgttatagtttatctggtgaagcattttaatgaggcatagctgtctgttccattaccgaacgacttttcttatgtgtgctctggtagattttcatatggctacactgaaagatattcccaaatgtctgactaataactctatctataggcaactgttctgaaggtttaaagtaaggaggatggggttcatttagaaccagtgggaaaaaatgctaatgctgggctttgaattttatggatgctgtagctgttatttttcaattaaataaatgttttatatgccatgttttgtagctatcgcagttaaactgccctcatctttttgcccagcaaaaaacccattaagatcttcactgagattgagtctaggttttttataaaattaataactttgctactggtttctcaaaaatgagtagaaatgacttttcaatgcaaatgccagtttttgatacagtgaaattatcctgtctgcagtgactatttgaacttttatcggcaattggacactgagagacttagtatatgaacagatttatccttagattatctaatacatgctttgcgccctgcaccataaaacccgatctatttttaaagccttggttgttctgaaaaatgaaatgaaattgtattaaatggcattttgactggggagaaaaaaaaaaacttcatgtggtttaagagaatggatgccggcaattgactgtctactgtttattcaaaacttatagattagcagccagatgtggcagaaagttggctgatttttcattcacaacaaaaacgatgctgtgcttaatgaatggaggtttgttatcccagtaataagtaaaaggaacatgaaagcccttgtgtttaatgttcatgcaaataagctatttgcaggtggcttttgggcagggtcaagtattttcaaatatttttcaaaactgggtcaagttttttaattgtcaaaaattaccagctagaggaaaacctcctaaaaactttattatgctatttcccaagtaaatgaaatgacaagtcacttatcatttaaaaattacatatgaaaattcttttccttatgatttcgtcaataaataaattctagaggattctagatatatttatttggcatttttttttaatgtggtatcaaattttgtggacattctttagagaatcaaattcttaaaatggcattgaacatttaatttaaaatgtccttcttgaaccatacatgtttattaaaaagttattttatataggttatccattaaaaaacaattttctatatatgtaaacatttatgataactgctcattattttggtccatacttatttatctacctatttattaaacaatacaaatcatacgctttgtaaaaataaaggcctagtctaatattactctctgtcagaaataaaataattcagagaagtctgtattagaagacaaaataaaacaaaacagaaaatgatgagaatcacaaaaccattgccaaatttccagctatggcatttactctccatgtggccttaggtatcttactctcttattttaacctttctttgattactgtaaaaataatttgttactaagaagccctcttgctttagtagctgtgagtataaaattaagaacataattctcaaaaagtgttttagtcttcctggaaacattttaaaatatcaattaatcattgaacaatacacaatcgcctgatcatttgctaagagagggttgcattctcatctctgttcacttctgtcctttctgagacttacacaggtatgagagctagaaaaaatattaatgtgtagtaattcaaaatttctcattcatgaatcacttcagcagtgcaaagaatactttgtaatttttaaaaggcatttttattaatatacttctactattctaccccaatcaacagcaaatttacctaaatcatgagactactggtacttctaatttttagaaaagaatgacataaactgctaataaacccaatgaatcctttacccgcaatgagaatgtccacgagtcagctcttctgaccctctggccagtgttctggagttactgatctccaactttctaattgaactctagcttggtatgtgagagcagccatgggtgaaccagtggagcaagatttaagccttgacattgccattaatgattcaccacctgttgcaagttcaataagttattcacacaccaaattgtggccgcagaattctgggagataaactaagttagaaagattgggggtgaataaatgtttgctaaatcagaattgttaatgatagaaatctgtatcttaacaaagttgagaaatcttgtcttcttaacgtgtatttattgacttcccaggatatgtcttagtgaggaaacatagcttctggcatttattattagagtgataaggaataataaaccacagtgcttgagagacagggaaaggcagggggagccagagacacagtaacagaagcagattaattgactgatgaaataaacttgagataagagagcacagaggaggttcaagagatggaaccatatattcctctctatctgctcccaacatcaaggaaattcatagcatattttataatgaatccctgataaatattagtctataattgaaaatctattaaaatgactatttcttagggtacacaaaaatattacaacaaaacaagtaaagaaaagttgccatgggatggaatattatattttcctgcatgtctgcttcaaggcagaatcctaatggtcatgtatgtaggtaaattattctttttacagcaacttctgggaggtggtatttggtgcagtataaaaggcaaggggtgtagtgagggtaaagcgtaagtactttgatcttgagccttgactatattggacttgggatctcggaaatcttggggataagcagtggattaaatccataaattagtaaagtgttgattatacaacaggtagaactacgtgccacttttggagggacagtcttcttttttaaaaaaaacaaaaggccttaaaggctttatgtatatataaagccttttttaattataataaatacatttttttaatgaaacaatctgcacatatacaattccactctcaagaaaggcagttatttacataattatgcagaaattcctataattatgaaaataattgcctttcttcagagtggagttgtatatgtgcagattgtttcattttaagaaaagaaatatttactgatttgattaactgaagttctggatgcttaaaaaatgattaaaatacacagatctactatctgtcttcatgaactttaaatgtcttgtaagaaattcaagtaataaagactacaacatttattatttaactggaacatgtattatttattatcctaactgtggttaggaagcaccattatttattatatctatattaatcaagttgtatcctgtaacaggtttcctgttatccactcatgtcttctaacttctgaagtattgtttaaattacaagggagaaacctagacactacattttctaggatctcaggacaatagagctccaggtgaaattatgctaaataagggcatgagtgtaagatgtggatgtcacagtgaagagatttagagcatttttctggtgacctcctgtttaggtttgacaagcatctaaaatcattgttagcaactttcccataattattgcattttcagcctttatgaaaatagcagcatttttttttcctttctttgcccatgcacaccatctaatcatgagataagtctccttctgagtccctaaatacatgacatacatagattgggatctttttctgacctgttcctgtctgatacattcttcaactctaagatgagttcatactcatcttctgaagcccctgggaaatggaaatattttttcatattggatgttggtagagacccatcatttaatgaacatttatgtgccaggatttgtacaagacacttagatacattattcatgtacctcacacaaatgtatcaacaacacaacaaaatgtctgtatgaaataataattattatatcccttatatggaaacagatccagagaggaagatacactagcatgtgtaaatagaggattcaagtattaaacatccatctgtccaactgactacaacctctttcataaaatgctaatttctctcctgcttctaattttcttatcaaaaattgtcatctattgttattgggtctatgggtgggtagtgactccttggtttccattttgttctagcggattactgtcttctttatttttgttctagtgtttattgagagtcctaattaattaacctggctgctctgacttccatcagctcaccattgtctcttctcccagctcataatttctgtaacagagctctaggctatgctgaagttctgctatatgttgccagtctctctagatccaagtgcctcttgtcggccaagtttacatgcacgtgtttaaaatcttcttattgactctatatacaaagtcttcacatgccttcctccttaaaataatagcattgtgagaagaaaaaaaaaatcatcattctttttaaaactaattcaggatgtctatgttatacaacaacaagacgtgggggaatatttacctggtagttctgtccctcgttatcattctcactcattataaaattggtatctgaaaaaaatcttgctgcaaaaacaaaaaaaaaaatgtatagggtataaagaaaaagtttgcttcacatcataaccattacccatcccattgccaaagggaagattgtacactacatgattccggggagcagcattcacatagactatagtgtgcatggtacatgcaagagaccccatagtactacccgctttgtcctccttgtagacatgctcacagatgatccatgctccctgacctggagtagtcaaataaaagagtagcatcaatttattaagattctttccagaccattttctaggtattcccattatatattccttcaaatggaaggattttattctgtacatcacatctcactgtacacatttttttctgaaatctgaaatctgagtattttaattttatacagtttcaattgtgagaagtacctgacagactgacctgacctaacactctctaagctaaaacactcataaactagcatagaagctttacacatttatccatttctctaatttacttatctattgtttcctgaaacatctattaatcttgcagttatttgagatgactgtgagcttactatttgccagggatggcatgagcaccttggtttagtctagtgcctggcatttattttcctaaactgtggcagcaagtttagctgtaagcatattttttatcagaacaatcatccatctttaactacatgtgaggaaagtactttcttatattgcattacacatttttatatggccacagaaatccttacttagtctgacaaaattatggtagatttctttctcctaaggtcaaggaaagaatcattctgtactgtttccatggagatgtttctccttttctcaattgccaattgtctactgtgtgtcctgggttccttcttttcatatgtcatgaggattctcaccccagcattctgctcctctgagtcaaagcccttgactttcacttctcaattgttttgtttgcagtttttttgctttcctttatttttcttactctataaatgctatgaaagtgtatgtaaaaatttacccatcttttagtttatatttgttatcaccctttattcatataccaaaccatataggaaatgaatataaggagatctttcttagtaggaggtagaagtaaaattttgtttagaataaaaacagaaaaaaagagaataaaattccatatcaccagtttgcttctaaatgcccaatgtttccacttatgagcttgctactgtacacaacgcaagggcttgtaaaaaattgtctaaatgatagtggttaaggacgtattttaggctaggttactttaaaaaaatatatcatcacttctgccgtcaaaagtgaatttgatgtatcataattgttaaagttgaggagggtcaaggattcttctcattctatggtttccttataaatacactttctaataaatgcctaatttttttctgtgaaattaaaccattagatattgctgaatgtctgtatgtttcttacttttctagaatctcattcttaattatagttttatatttttccttcaacaaagtcttaaaacccatgcagctggtgtctattatttacattctgtgatgtattttatttgactttgtgtttttagtcttttcacagaaatccttttattgtgatcttcttgtccaaaagcacttatttcatatctcttttccatacctatcttcattagcaggttgcatttcagtttcttcagtccttttttagataatatattttactacatctgccttcacaacactgtatacgctctgatgatcaggtctcccttctttttttttttaaaattctcgtcctctttgggacccgtgacaaagtaaaaggcagatttttttctcacctgacttaaaagtaaaaaggtggccgggcgcagtggctgatgcctgtgattccagcactttgggaggctgagaagggcggatcgcgaggtcaggagatcgagaccatcctggctaacatggtgaaacccgttctctactaaaaatacaaaaaaaaaaaaattagccgggcatggtggcgggcgcctgtagtcccagctactcgggaggctgaggcaggagaatggcgtgaacccaggaggcagagcttgcagtgagccgagatcgcgccactgcactccagcctgggagacagagtgagactccatctcaaaaaaaaaaaaaaaaaaaaaaaaaaaagaagtaaaaaggcttcatatgtttctcctctgattcttcttaggcccagcatttccaaaaacaaaatagtacacaaaacattagttgtaatgatacttcaaaaggttcaaatactagtttttggctgctttctgtctatatttttcttctaaagaaattttgttatgaagtattgaactattcagtatactttaatattttccaaataaagtttccaaactgatatttaacaatattctcttatattcaaacatattctgaactattttctgctgtgtctctagatcaatatttataaatctagattgttcatgtattttttttcctttgctaactttcaagatcatatcaaaaagcaccactgttgattccattttttatgtttcattatttgaaactatattgacatttttcctcttctttatcattccctgttatctcatctttgtgagtcttccaattaatgttttttcctttgaattatttattttttaattgaaaataaattgtatatatttaaggtgtaccacatgatgtcttaaagtatacatacattgtggaatggctaaatcaagctaaacatacgcattatatgcattaccttgtaatcggaccccttgagatgtcaatacctcagcatttttagtgattgagataacaaaaattcgaattaggcccttgcttgcttgcataaaagccaacatcccttgttctcacaatacaattgcaaactgctgatttactatttctttgtcaaccaggagaagataactttaaggtaacaaaaaacatttgcagaaggaatgaatgcctataaggatgttgcaactaactgctgaggcccagaagtctggttgctcaggatattatcagagattaaagaaacacagactttccccttggttccctaaaactccccctctcttactgtctagctgcaaaaatatcctctctgcattttttttttttttttttttttttttgagacggagtctcgctctgtggcccaggctgcagtgcagtggcgcgatctcggctcactgcaacctccgcctcccaggttcacgccattctcctgcctcagcctccctagtagctgggactacaggcgcccgccaccatgcctggctaattttttgtatttttagtagagacggggtttcaccgtgttagccgggatggtctccatctcctgacctcgtaatccgcccgcctcggtctcccaaagtgctgggattacaggcgtgagccaccgcacccggccccctctgcttcgtcttattgttaagacatgtctgagagatcttgccccgttctcactttggccaaatggaataaacttttatctatccccaagcattggtgtgtcagtgtttggtttcaactgagcatcaggtacatgagcccgaatttgggcctctacaacatcttcacctacttactatattttgtgtgtgtggtgagaatacttaaaatctactctattggcaattttcaaatataaatgtattgttattcaccgtagccaccatgatgtgcaatcaattttttgaacttactcctcctggctaactggaattgtgtgtcttttgaccgacatctctgcaatttccccatgccctagcttctgatgactaccaattaactgtctgtttctatgagttttacttatctaaactctctatataagtgagattatgtcatagttgtttttaagtgcctggcttatttcacttgacgtaaagtctcccaggttcatccgtgttgttgcagaagatttcttccctttttaaagcccattaaccttttatagatctggtactgaggcaatgcaaacttattggacaattatatgttatttgaataaattgaaacataacagcttataaagggtcaaatggcagttaatagcctaagaaataggtttggaatattatttcttagcataaaggataatactggtcagagtcttctaggcttgaattcttggctacttagattttatcaagtaaattgtaaaaggatagtcaatcacttttttcacatgaattgctgtatgaattttgatttgacaagaaagactgtgaaaacaaaaccactattatctgtgaactacctaatgtggaaagaaatatccttaaataaaactttgagaaagtagattactcaattttttccgacagatatcccatatattgtaactaattataatatttaattgaatacaaaatctttcttcttaaggaaagattttattcagttttagaacgttaaagtttctccactctaatatatacagaacttctttaacctttaaaaatattgcttcacttattactcatgataattgggccacatacataattaaaacacaccatttattatttacccttgtaaaagtggcatctggttccccaacttagcttcaaactgtaattttaaacaaataataaagtgttttgaaacattaatgtggttaattgtcttatctattgtctatgttcatcaggagctgtgacatgcgcaaaggaaggtaatcagaggaaggaagagaagaagctaagttctagagaatccattaatcatggtttagatgactgaccattttattattttccattttccatttaaaaacgttccatttttaaattggaagggggtatgttttagaatagaataacgaaattccctccatctcctcgtagtgtacgtgattaagaagaacctaacagaaacataaggttctaaggttcttgctggaaataataatcagaactgtaagaattctcttatagaaaacatttaaaaaaggaaattctagcaatagaattcattgttaaaactgtaagtcacaacaatattgtctctgcatgctgactgtactcctctgtaatcttcaaaggcaaacaggaacagtaataatcttttcatgtactcttaacttccttctctgaaaggctagaaaatgtcttatatgtagcactcatactgtcatttaatcaaacccagtttctgtttttcttcaatttctaggggaatggctacttagtctttctggcataatgtgaatttcttaagtgtctgtagactacatctcctatttttacttcttgaagtttctctcaaactgtgataaagagtgtcactctatcggtactgttaacaatgtaaattttgtttctctttttgttactgccaagattccactgactgttgaaatataaaagaaaaacagcattaaatcaggtgtgataaaatcacctttttctgtttatctccaccactggcatttattggcacttggaaactatttataaactcatactcttgtaacagtcttgtaactgaaacccactggattcaaaatctattcctagtacttaactttcttctgaaaattccctcatctataaatttgaggatgatgataattgcaaagatgccagggaaatttataatcattattgaactaatccttttgaaaatataaagcagcattaaatgttacgattactaatctttttaattaaagtggcaaatgtgtccaaaaatctgtaactaagttcattactctcatttatgcagctaaacttaagttctaccaaatgtatttttaagttgattaaaaatatggttggcagcatttataaatacccattattaacatgctatactggtaaatatatttctgctcttatgactagagagtgttgtactttagtaaaaaacttatacctcaataattatctgctctcctatttttattttatttgcaatagatatgtatttattcatgcatttgtattcttattgaatgaaggatgttatgtcacttgcattgagtacataggcatccctttcgacaaataaaatcagaatctaaactacagaaccaggttcaagtggggacagaagtacaattttaataaaggtcaaagttttgctagtgtttcacttaaaatttatttttaggctttctgaatgttctcttaaagaaaaagacttaatcatatacgtaccttttttgtattgttaacaaggaagaaacatactaatatgaatggtactacatacattatacatgttatacaagagaagaaaattatatattcaagataaacatttttataatcacaatacttcaacataaatgtgttcaatatagtaaagatgcaggttgtataatttgtcaagcaaattctcaattatgtttgaattctatttaaaatcaacattagtattgacaatattcatatttaaggctttttaattatttaaataggttcaagtttgctgtgttcagcattattagttgtaaaagtaggctctggtaccgaaaatatatatttttagctcccttctgtcagtctttccattaaatgctataggctcacagttttacatgcctctcagcacctcactgctcttgttgcctataatattttattagtttaatccttctgaaataatcctggtcattcaaaaccaatacatcaaaatcttctagagtgaacaaaagaaaaaacatttgtgaagattaaaagaaaaaggagacttctcagatatattaactttaaagactatatctcacaattatgtaatatatttgttgctttatctaattagatttgcatttcttatatataccatgcatataaaaatatatttgatacaaattataatacaaggcattcaaaaatagaccattataataacagaacattttctaaagggattttaaaactgtaagccaaatgccttaatctaatactacttctaaaatgtattctaaagaaataatcttgcatgtgtggttagacttaattacagaaatattcattgtaacctttctttagaagtgaatattgaaaactgaaataaatctaaatgtccaactttataattgctagttatggaatactaacaaatgaaatccatgcttttaaaatagcatttagtgaagcaaatatatgttcaaaatacatataaaggaaaaactggtatgttattaaagaagatagaataaaatttattttgagagtgtatgctaataagacagttttgatatttaggaaaattaaaatgttaggtaatattttaaataaaaaaataaattttctgtttgctgagattatacgtattttaaacaatttttaatgtacgctatagacactgaacatgtataatttatgtatcaagaaaaaaatcaataagttcaatttttaaaatcaaaattaaaagtcacataatagatcagagaagataaagatgaattacacttttttctttatctaacaaaagagagtgcatggtttatggagacagacaatttttttctctggttttaactctaagatataaaaggaatctattgtatacatctggaaataagaggtatttaatacctaatgtatattaagattactgttttagctttttttttacaatatagaagtactgtgtgatgacttaccttatcaaccattgaaagagccattttcaaagattgattaaaatcgaagagttccataagcaattttcactaaagcattgaaaactattatccaagattaagaaaatacttttctagggatccctcatatctagggatctaatgaccattagatccaccttgtataatggaattaggacaacccaaagatctggatgattgaattgtcatttggggattattaccatcatacagctcagtttatggcaatttctatacatgtgtttagtattaattgaaggaaactcataggaattagatgccagacatgaagactatatacatatcttcagagcgcttgtgtcctaaactgaaaagtgtgttttaagagtctgggatatgaaaccaccttttctctattcttgtcaaatccatgtcattctagctactgacataatttatgcaatataaatacaaataatgataagcaaagttatatgaaaatatgtttccagtatataggtagttttaaccattctttttagaagaaatgtgtgtgtgtgtaaatgtcttaattgttaaaatgattaagtcattcacaggtttgttaaagtttttccatgtagctggagtgataataatttgtattacattttagagtggtttgatgcaaataaataagaaccaactcaaaatgttattgaggttaaactccaagaagacaaaaggaaaactaaaataacaaattaaactataattaaaacatttcaactaagaaaaaagtaaaaagttaagctatctcagacaatgttcgagattgaagcttgttaattgcaatggaaaaactgctaattaccacaaatagtaatttagaggcataaatattacacaggtgtggctgcaggaagttgatattaatcaaacacatttggcattttcaatgttgcaaaaattacaattgtaaacaccttccatacaatcaaatgttatgtgaattttaaatgagtctcaataaattatactgcataaaaacaggatttttactatggatcataattgttaatgtcttccgtactcaaggttgaaatataaatcaattcactctattatttggtttggaagtttaagaggacaattcacatttcctttgatacactctaccagtgtcactggactggtgatgtgacaagaaaggtcttctgtagaattgaattgcaataatatggagattataacaaaattatatatgtacctaagaatattgactttaaaagccttcttcagattgcaacattgatttccagatctgttgggaactagctgccttacttaatgtaacagtcttggcaatggaataatcatatatatcacctatggataattaatttttaatcattgaaattcactgaaatatgttgaacatgaaaatcatacaaatataattttgtatgctgtttcagattctttggaattttattctaagcatcaatcaagatggtatagtacgagaaaggtagaacatgtaattataaattcaggattcaggaagtttatttttctcttctttttaattctctcaaaatgatcttgattcctgcaaagtgttagtatatctggtaagtaagagtctatttcttttaaacttcatctgtattaaccagctttatatgaccaaaatgtcccccaaatttaaatctttgcacagtaaggccttatatgtacacctggcctcatttcaaaagactaaagcagttgttctcaaattcagctgcacattaatataaactggaaaactgtttaagctcctgatgacaaagccacatgtgagactaatttatgctgaatcactgggccaaggacccaggtatcagcattttttaaaactatagaggaataaccagggttgagaaccactgcacaaaatggtaaatgcaacttttatttaagttattttttttaaataaataatggttgaattgatactgatcttagtaccaagtcatggcaattttttcagacttagagaattcatcctggcattgagattattaaagaacctagaaatccaagtgtttttgtttatatttttcctgtaaatattagagtatgctagtgctcatccttatttgataattttggaaaatatattaaacatttgagattgaatatcaaaaatctctaaaagaattttagaaataccattcttctatgaaataagtaagctcaatcaagatacatattatagtgcccatttaagaaagtctaataataatgcttgcactgcttaaagattaggttgataaattaattattgttaatcctacttacataatcaacggacacctagggatggagtcttaagtacagacacagaagttgaatacttttaagaacttttaaatttacatccgggttaaattttactttaaaattatgttgagtggttgtgattagtacatgtgtgattagaaccgtctttctcaggttattatatcaccatatagacacaggaaaaataatagaattaaaaataaagcaagaaaaataatgtgacactttattggcttcagataattattttgagatcctaatcctaccaaaacattctgcttttcttaacttgatcctacttttgtttgtttgttttaataaaggatgaaccaatatcctgagaaattttcaaatagggctggttataacactaagaacctagatctcactatgttttagaaaaattgtaaagtatttcaaataatcagtaaagtttcagctctgcaccattgtgtctttgcaatatggggaaagtcacttcacttctctccctctctcgtttttggcacatgtaaggcagagaaaataatatctactccagctatcccacatgttattataaaatataataagagatagaaaatcactttataatgttcaaagtattataaaagtaagccatgattatatgtgggattaacagcagtttgttatttaccatttaatgtatttctaatgtacatttttgccatatttaaaaatgtttacatttcgatttttaagtgaaagagtaacggtatgacattatgccatgttatatctgatgccattatgtcaaacaaacaaacaaaagcattttaaactatttggaatcttaccaaaataaatcttataactatgataatacaggtttttgaggatttcgtttgtacgcaaaaacagaggcaataaaggcaaaaatagataaacaggattacttagaattataaaccttgtgcagagcaaaggaaacaggagggtggagggtggagaggcaacctacaaactgggagaaaatatttgcaaaccttatatttcaatgtactagtgactatcaccctaataactagtcatgggagcactgtcatgcatttggtatgtttttgttttcgggatgctgccacttaccacggcgggagcctgatccctgcggaatcgactgtagctggacttatcttgaatattctgagccaacataccaaaccataaggtgctaattcattcatgcttgaaggccataataatcaatacacattcacgcacacatgtacgttcacgcacacgtacgttctcacacacccgtacgttcacacacacacgtacgttcacgcagtatttaaaggagtgcttccgattaaatccgcagatctgccctccccccatctctgagtttattgttaaattaggtaagccagcccccaaaaacaagatacttaaattgaacctagtcagagccctaaaaatcataatttaaccatgaacactccaaccctagcccctcgattaacgtaattttctaaaaaatcctaacattctccaaccaaataaaatctcctatttcgatgctaactaaatctctgtcctaatacttatataatacttcaggtatcccgctctgaaaagcttgtatcccagatattatagtcctaaatcaaatataacttcaactacaaatggcccctcagcgaaaacctctgctagttcaacttttttaaaggccctaaacttccaggactgtaaaggaccactttagatttatacctaacaagatcctaccccctgacatccccctagtatttcaaaataccactcaaatgtttttcacccagttaatgtagcttaattatttaaagcaaggcactgaaaatgcctagatgggtccgcacaacccggtaaacatagaagtttggtcctggcctgttttttgaattcttagtaaaaaattacacatgcaagcatccccgccccagtgagaatgccctccagatcacctggatcgaagggagcaggtatcaagcacgcataaacgcagctcaaaacactttgctcaaccacacccccatgggaaaaagcagtgataaattttaagtaataagtgaaagtatgactaaactatactaatatttatggttggtaaattttgtgccagccacagcggccatacgataaacccaagctaataaaactcggcataaagagtgtttaaggtctacattcagtaaagctaagctccatctaagtggtaaaaaactccagctgaaataaaacgattacgctccttgaggataagatgcatattgtaacaattttctatatcctccacaatgttttgcagattcaataactatttaatgaattgagttaaatttgcctatactcttacgctcataaataaccttctaattctcaattcctctaaaacatagaaaaaattgccaatataaaaaagcaagaaagaagatattaaccattttgtcattcaaaatatgactcattcttatacaactacctttgtcagcattcttgccattggactatctagactttgacgctggtatatcatggcttgttgttagagaaggtaaagtttggaaaacagaagcagttatgtaaagcaatcttagaaaatccttgagtttcccttagaattttgtgtcttctacatgttttctgtttcacatagattcagtttgcagagttatgtcataatttcatgagcgtatctgtcagagagccctttgaaggcctatttaatccaactaagaccattttttattgttttaataccattgaacttgttctgataattgaggaaaaagagaaagacattccatataatacaccagatgcctaagtgctttggatagtcataagccttttctcctatagcttcctatttagaaatgcctgctcttcagagttttcttaagctttccaacttgctccttccattttataagaataatagtctatttaggaagactattatcaaataaaaatcagaatgatcagtggacacctattttagccttgggatttatatcacaattccctaagactttatatttccagaaaagaaattcaaactaaaggtcacaattactattattatagtaatactgataagatgtgcattttaactaaaagaagttcccactatttttttttctttctacttttcaataatccttgggaccttagtaggagtgtgcagtagtcttgtggtgtatttttagtttaaaagtctgagcatacctaattaccacttggtagatattgttcaaactcacttttgaatccaagtgtttttaccctcatagaattttttttaaaacgagtatttgcttgtttctattatactgtaactattggagctactaggaggccttttaaatttcaccaacaagtaggcagaatggagactaactgaagggttgatgggcttaaagaaaataaataacctaacaaaaccaccaggctaatggcaaaaccaacattaggaaccaagtcactttacttgggattagtggataccaaaatgtgctttctcggaagcagcactttacaaggaaatacggaaatccacctttgttgtccttcagctaaagggaataaaatcatgtactttctataattttaaccctgttataacagatgctacatgaactcaagtggaactctgactgccttgagagctgaataaaatgcatcccaccatccgttgcagccgcatcaaggtattaaaaagagagacagaaggaagaggtgagagaggcacaagttcaacagtgtgaggcagtcagacacaatgggagggagaaagaaataaatgtctgaatgtcattgaaagaagagacaatgaaggcatatgtaagagtcctgctaaagctatggaacctcaggagcctatttgtaagaactacaatttagaatagggaacttgcaatacaatgcctgacctttatttcctttcctgcctcgaacttgtgaaaacctttgattgacttttctatgaacatgaattactgttacaatatttagttgaacaatatgaatttctcaaagcagtaatacagcgctacagcatagcttaacattgtttaagtaatatggtttgcttatatttaagtcatttctaagggacccatgcaaacacagtcaggagatctatttctgatgtatttccaaggctagaaacaaaaaaatgctgttaatgcataaacagtcaaaaaaccatgcactgtggttttacagggacctctatttctaaagatgattgttgcatgagggtctctgcctttatgaagggaaatgtgtagattttaactagatctgtttgtgttttgaaaaagaaaatcatgtttctgcactaaaaaataaattcctaatcaaacctttaaagttaacatttagaacagggacagaaacttctgttgtttcctaagtgttttgctgttgttcctgtttagttttaaatcattttttagaagttttattgaggtataaaaaaattgtacacctttcatatattcacctggatgagtttggaccaatatcatcatcacaaccaaggtactgaacatacttattcacctccaaaaattttcttgtgttcttttttaatggtggtagtatatttttaagaattcagcctttgagcagggtacgaaggaccttcaacaacaaatgcaaaagtaaatgagctaagttcatataaagggttagctctcagtgagatattcaagttatgatcatatcctcaagaggcttgtaaactgactgtgggtttccagtttggttattcacagataggccttcatttgctcattcacctattcattcatatagccactcattcattctcaagaagaggtatttgtccatatctcaccatgtggatgagcagatggtcagttctcacttcttttgccattaagtgtgctcaccgttgagctccaggatgatattttctctcactttgcgtcattaccaaagtggctatcaagattccctcccctaccttctttttcttttttcaatgtttaagagctggagttaatttcttgactcctttggtaacacatgccgatatataccactcaaggcctgttggattaaactgttaaatttgtcatctagctaatgttttctcagaaccagacaaattaaacagagtcaattgttgaaattatttcaaaagataaacaatcatagaatggaaataaactacagaaagtagggaacaggagtaactaagtctcctagaaaacatttgcagcagatgttaagtatccagtctcgttgttataaatgaatttcaaagaatctcatgaggagcagctttacaaaattttactgcactaacaaatggcagccaatctctgtagtaaacacaaaatactgtaacatcctttgtatctccttaaattaagccaatttctgcttacacagaaaatctgtctgtggaaaacactgcttagaatttgaaagcacattaatctggaagccacaacagaagtgtgcttcagaaaacttcttaatatttttcttgtgagttattctctttacgcttttcacattacaatattaccaagttatcataatgtattttctgcactcccagagcaagataagactctagtagttgctgggaactatgcattgtctaaatatgggttcacattctctcacagtgattctggaatcatacacacaaatgagatcactgctgtcagatcactgggattaagactcaacctctctactcactggccatgtaaatatagatacagtactcagatcctctgaggcttagctaattatcagttgatttggtctacacttaccacattaattatttgaaaggattcgttgatataacatgtgctgacaaccataatcattattaaggcaatgtttaccaatatgtgactttaaaacagatactactattagataacaattcacactatacattcaatatttaaacaacagaattataattttgtgaagcaaattttgtactcaaacagaaaatccaattctataattattttctgcaatattgggtcatagaaccaacaaagaatatatgactggcttagacgtatgtaattacttatgcaattagtaataaaattcttcactcattcctagatttgaatccctgatgctctgcgtagcagctgtatagtcttggacaagttgcttaatctgtctgtacctcgatttcctcatttgtacttcaattttcttatgtggtaaatataaaattacttaactcagagctatgaggtcagttttatttgagagaatccagaataaaatacttagcacacatttcctaccattcagcatgcataatacgtactcaaggaaattttagatctctgtacatgattaatatattaaatcctcaaaccgactataatgtctgaaaatgcatgtctttatgtcactgtacctctcactgcacttggcacagtgttgtgaatatatttgtcatttgtatgttctttctaccatacaattctgccactccaattagcatattgtgttggaaaacaattgggtgcttgccttatgttttactaaatttatacggaactacgttgacacttccttgcccttcagatgctggcactcactggttgctttctagttctcaggagtctctgtgtgactctgtcctttacacttgccctgcaacatcaccctcagccctagacaaagccaacatcatttttaaaaacctgcaaatatgtctgcaattcactgtatgaatattctcattctatcaaaaccctgacctcactaactcaatggagcaatacaggatgagaaagtagtttatatgaaagtcatagaaagcttgctttgtttattcatccaaacgtatgtttttaaaggacgaggcttttatctgaaacaaataaaattataatttgaaatttcaaataatgtgactaatatattatgaattcatttccaaatatagaaataattaaaacacttggggtatagaaaaatgagtgctgtatctattcttttcttatattaattttaccccagctgccagaatttagttttttgtttttgttttttttctttttctttttttgagaccgagtctcgctctgtcgcccaggctggagtgcagtggcgctatctctccgctcactgcaagctccgcctcccgggttcacaccattctcctgcctcagcctcccgagcagctgggaccacaggcgcctgctaccacgcccggctaattattattattattattttttttttttttttgagacggagtctagctctttcgcccaggccggagtgcagtggcgccatctccgctcactgcaagcttcgcctcccgggttcacgccattctcctgcctcggcctccctagtagctgggactataggcgcccgccaccgcgcccggctaattttttgtgtgtgtttttagtagagacggggtttcaccgtgttcgccaggatggtctcgatctcctgacctcgtgatccgcccgcctcggcctcccaaagtgctgggattacaggcatgagccaccgcgcctagcgcaaagatgtattttactaataccacagaggtataatctgctgctacttcttgatcaggagtaaacaagtttacttcacagcagttgatctaattttcttccccattcattcaatggtattttttttattgttatagaacatactgaattggataataagtccttttctttttcttttttcagaaatggtttctactctgttgctgaggctggagtgcagtggcattatctcgactcactgcagcctctgcctcctgggctcaagaaatccttcgacctcagcctcccgagtagctgggactacaggtgagcaccaccatgtccacctatataatttttgtattttttttttttttttgtagagacagggtttcactgtgttgcctaggttggtctcaatctcctgggttcacaccatcctcctccctcatcatcccaaaattctgggattacaggtgtaagccactgcacccagctgagaaggctttttattataggttgttcttattgttttatttagttggtttacttgttggttttcaaggtaagtttgacatataaggtggtataatgtttaaaggtcaagttatagagatagctagattgaagttcaaatccagagccaagttacttagactctctaaggacttgttttttcccttataaaattaaaataaagtggatagccacttcataggtttgtaataagaattaatatgatcatgatgtcacagagttgcaaagagatactgaaacttggctctgccaaaaaatattagctattgccattatgattgttctccttaatacctaaggcatttgctgacagtcaggttactcatcatgtccttccaggaaaaaaactttaagaatgttgaaaacttaggaactacttttaaaatttaattttcagacctgacataacacagctgaggaagagaggtggtagctgattggggatagatgtagagatcattaatggtataagagtgtgagaatgtgaagcaggataggatatgatattactcatacagatcacaaatacatgtcaaaattatatttatcattcatttaagtaaaattcaacattgttttcttcaaagaagaaattgcgcatttcactctatctatttaactctggaaaattttacaaattgagcatgccattttttagtatgaattcctttatttcagctgccctgctaactttggcatgatgagcagagaaaaaataaacagaatgattagttctgaaatatgaaaaagtgtctaagaaaaggagtagtcttgagaagtagggaacaggatgaagtcactaggggacagaagggtaggagggagtgggaccagacaaacactgagctctgcatgcacacgtaacagtctaaaatagtcatccagcacgcagactctaagtcaagataaccaagatgaattgccaacttctccacaagcaatatgactttgggtaaggtatttgagttttctgtgtcttagtttcttcaactgataaataaaaatgatggtcatatctacttcataaaattgtgataattgattaatacatgtaatgaatagcgtttggcatttagcttaataataagacttttcattaaaatattagctacttttgttagctagcaactctcagttttgcctaaagctgaccccatatctagggtgaggttttgaaagaaattcaacaccatcagaagtaggtctggaagttataaaggaaagcttaaagaaacagaaatatgtgcaacacctatttacaaagaatccattgggaaaaccccattgagcccagggagatggcacatgtcccctttggttatggaattcagttccctgacggtcagtatactgtctttgttcccaaggcaaactttttaataattgtgatcccactcaatagtcatgttcacttactttatgggtacatttgtggcatattttaaaatgtgaagttgagtgcatttcacctgaaaaccaaaggcatgtaatgacaacatgctatagaggaaaaattattgatttgtgtaaataggcagatcttgtttgtattctagctccatcacttactaattttgtgatatgggcaatttatatcctatctgagcctgtgtttcctctacaatatgaggtaatttctactttgaagtattgttatgagggttaaatataaattactttctggtttatgatgttggtatatactacttctatgcacaaccgttatttttatgaataagattttaacagtaagccacagaaaatataatgtaagactgattcttagaatctatcaaaacaggttgtaaaaatgacttaaacatctagcatggcagtgactaacattttgaaaagcttaatttttccattaagaactatagcccaacacagtgtctgtgcttcagtgttcctcttatcaggaaggataatatgtgtgatgcatggactaactctaatgaaaatttttattcttaagacacaaaatatttcccagcacagtacataaggtctttgtgcttatgtcagcattggagataaatttctgggaaagaagtagagaaactgctcatttctatagacatcaaaacaccaaagtagccgggcgcggtcactcatgcctgtaatcccagcactttgggaggccgaggcgggcagatcacctgaggtcaggagttcaagaccagcctcaacatggagaaaccccgtctctactaaaagcacaaaaaattagccgggcatggtggtgcatgcctgtaatcccagctactcgggaggctgaggcagaagaattgcttgaacctgggaggtggaggttgcagtgagccgagatcgtgccattgcactccagcctgggcaacaagagcaaaactctgtctcaaaaaacaaaacaaaaaaaacaaccaaagtaaaagtgaaaataaaggtacacagcagactttttctttttaaatacctaaactgaaaagtatacctgtcaagaaacatccaactcatgaattactttaaatatgtttttaaaacagcgtgcttgttttataacaatagattcatgctagttatctgatattccccagtggttgctttgtggagctcagtgtcatccttggagaacatgggcaataaaaagcatttcttctgcaccagtaagacaaaaacaaactgactacttctcacataaaccttggagggcttccctcagtggggttagtgatcagcaaatcatgtcaaataaccccttttgttatttttgacataatagtgttcctagcagacagtactcaagaattcccagattcttagctgtaacataaatttaatatactctcttttattaaaagtcaagctgtttattcacagtagctcttaggtctacgtttcattttacacatatatgtggatgtaatagctttttccttagaacttttaaaaaatagaattcagtaaaagtcctatatttgtattttctatgtgtcaagaacagataagcatcattaatgtgaaccaaatttcaattgaggagctgaaattaggaagaattgaaaaacacctgaaataaatcttcaagtaataaaggggaaagtttactttagaattagtgtatcaaaaatgagaaaattggctgggcgcagtggctcacgcctgtaatcccagcactttgggaggctgaggcatgcagatcacctgaggtcaggagttcaagacctgcctggccaacatggtgaaaccctgtctccactaaaaatacaaaaattagccgggcatggttgtacatgcctgtggtcccagctactcgggaggctgaggcaggagaaccgcttgaaccccagaggcagaggttgcagtgagccgagatcacaccactgcactcgaaactcggtgacagagcgagactccataaaaatcaatcaatcaatcaatcaatcaatcaataaaactttttaaaaagtcattgcattatttttaaaaaattaatagtttcaaaatgtatacatgtaaaatctaactgggaatactttgtatctacttgtagcacaagattaaatttattttcaattactaggagatttgcacaatagagtatatatttactttaatctgtatgactaaaagcctcattgtcaatgtgactatgtcatcattatcacattcatgaatctcctgattataacctgcacagatggtctacctacagggctctgggataagaaacttgctgtctgtctacagaggaagccgttttcacttccagatagttctgaatatttgcaagtacttgctgatttagagtcaaattatgtcttgctgtaacatccatgttactgaacttacatttgagataaaccaagattagactaaaccatgccttcaaatgacactctcaaaaatgtgatgcaatttatgtgccaaaactatcctatcttgccattttcctccattttttaggaaaagcatggtcctagttttgttagccacagttgacactactattttaaatcactatgtcatttgtatatcctacatttgaacactctttagtgtcttcaagttaaaatatgcataaaaactgcacgtccaggatactctacctggagaaaaacatagctctcattaaccttgtccagacattaaacttataagagaaaaatcattattttcctgtaaccaaattattccgctaaatttgtttttaggcaggattaataaacctttactgtaaagggaaagaggctaagattttaggttttgtgggccatataatctctatacaactgttcaactctgctgttgcagtgagaaagcatttatagacaatacgcaaatgaatgagtgtgtccatgctgcaataaaatttaatttattgcagtctattggctggatatggcctgcaggccataatttgccaacccttggttgacagtatagctagctaaacactgcttgttgtagtaaaatcttgctttttaaaacgtatgtctctcatcctagtattgtcattacgtgtgtgtggtttattgttaaatatgtaatatttaagggtctttcctatttagttttattaactaaaagctgtttcataattgtaatgcacagacatctatataggtttttattttatcattcaacctattagctaatccttagagttgtttcatttttcatgtgtttgacagatgaacatgtctaaaacactgatgataatgttaccagaatataaacaaaaatgaaattttcaggttaaaaccattttgttagtaatatgtaagtatatcaattaaccattaaataatttaccaaattattccattacctaatccatattgctccttcttgtccacaagaatatagtaaggtacatgtcaaatacatacctctgactttagtgggcatttaatgtattattagaggatcctgatatctgtctttcttaaagaaattaaactcatccctagtgattatactttcttcatctaacactataatattaataacatttgaaaaaataatgtctaataattaacactagatttagagtatttttagacaattttctaaaattatctgaaaaatttgaccagaatcattgtaaaattcacatctgagcttatgaaagcccactttattccactctaaaagaacaaaattttgtacctttaattttatcttttaaaatgttttaacataaaggtagtgggagacgttactaaaggaagcttaggtagtaacgtatttgtcgtctcagttaacacaaagaccatagatggggcagatctgcaggatgcaaaaactttcctttttctcacctcatagtagtcatatggctactgcaattctctggtttcatgtgcttacaaaatgtcctttagttaaaaataaaaagaaagagaaagagaaagacaaagaaagaaaaagaaagagaaagaagaagaaaagagaaaaaataatttcttcatgtgtctatttaaattaacaaagacgtgaattgtcccagacctccctgtgatgagtaacttcatgtgtcagttttactgggctaagggttgcccacatggctgataaaacattatttctgagtatgtctgtgtttccagagaaattagcatttgaataggtagactgagtgaagaggatcatcctcaccaatatctatgggcatccttcaatctattcagagcccaaataaaacaaaaaggcagaggaagggcgaatttaatctgtcttcttgagctgggacatccatcttctcttatcctctgatattggaacacctggttctcagacttttgggcttaggttgaactatatcactaactttcctgggcctccatcatgcaggcaggagattgtggaatttctcagtctcgacatccttgtgagccaattcctcccaagaattatcttcttctagctatctctgtctctttctctatctatttcatctgtaaaagtatctgtatctctgtgtcatctatatctgtatcatctgtatctttatctcatctgtctctatctctatctctacctctatgtctacatctgtcttagttatctatctcatttatggttctgtttctctggagaaccttaactaatatagtccttatcttacaactcacttgccagcttaccatgattataaccaagttgatcacttcaaaagaatactaaataatatatattgtttacactaagagatagctagctactctcctcaagctgaatctggcccccacctcacttagtagagcaagcaaactaaatgtagattatacattttttactcattgaaaaaacccaaataataacttatgacatgctaaaatttaaattttgatatacaaataaaattttattagaacacaattatatttattcatttacatttacattatttgtctatggctacttttacactaatgcagcagagtttgttagttgagacagaaacaggccaataaagaccaacatttttacaatatgaccctttaaaaaaaaatggacccttggtttagactgatcaataatcctatgggaggattttaatgattttcatctgtaaccaaccaagcacattttttttcttggctaggataaatttagaacatctatgtccttccctaaaatagccccacatacttgaaagtctgattctctcataactatatttttttctctgctgttaaaatttgaactcattctcttcagaaataaagaaagtaacaaaatagaaactaagcagtcccatttttattttgccatttatgagggcctatgccacctagcggtgatttagtatgtatttaacaaccagttcactgagaaaaactgctgtatttttagtttgcttaatttagtggtgttgaatatttcctctatgaccaattttggcttacgaatatgatttctttgaatgcaaagttgggaggagatgagcactgtgtgctcctatgaggagttccatctggctcaaacataaacactattaacatcactttgctctagacatgtgattctctttcataatgcttcttgcattaactgcaatataaaagttacaatccttattatttttgaaaaactcaatttgtataggactcttgataatattttaatatgtatacattttataataatttttattgatattttttcttcttttatacttttttttgtttatttatatagtttgttttcacattaaatgggagaaatactgacattgttcaattcacacccagggaaattctgtgtgaatgatatcatattatatttcttttaatgctctaaacaatgttgtgaggtaagtgttatctctgatttgcatatgaagaaacatattccgagattaaaaaattgcccagtttcacacaaggaataaattggagcacaggagttctatatagatagacctgtatgacttcacagagtgaaatggacagataaacaattcactttccaggagaaatcacaggacaatggatatcagaagaaatgatgggaccagggtaatattggatgttttgtatataaaaaactaatgtgggcaacaaaaaagcatataaagtcactgaagcaaaatatatataatatatattgcgaaatctaaaagaaaatatgctattggtaggccatggctacattataaaaaacatttcatttcacataaagtatgaatactacactatgactatgagttaatattaaaatttgaccacataggaaataggagaaaaaagtaacaacactgtggaaagcaaagaaaatgactgcaagatgaagctatcaccaccatctcgtggccacatacggacttcctcagaagcttagatgaataaagggaagagactggagttattaaaatttgtaaactcagagtaaaagccttcctgagctgaggctagacctctgagggagagatatgttccaactgctgctgttacctctgaagaggcactttctggggctctgaaaaaattggtaaactgaaacaattactgctcctagggcaaggggatgttcttgggagaatatcagcaaggacggcaaacaaacaggaaaaggagatctattcttccattctcttgcctatgtttctctagtacctcccaatagcagaacgtagcaggatcccacttgaaggaacttggaaaacgtagcttgctgatccccatcacggcatcatagcaaatttatttcagagaaatgtggctaaagatcaagattattagtaaatcaatttttttacctaatttttaatctgtattgatttcttataacataaatatctgtggttacagagacctcagtattttctttttcttctgtagcagcatttcaatcttttttgaagttctacctctctttcacttctagttcacaccatgtgagaacaatggacctaatcatcatgggcagtggtcataatatgtctcaacctgcccaaaataaagatgctaccccattaaccatatgttttattttgtaatacgatcatgatccaacctagtctaatgagaaacttaactagaaattttgttggaattattgaggaaaacagtgttcattttctgaaaaagtagcttagctagtaagatataagctcagtgctactagtggccatcttgatgtggaacaatactgagaatatttcttcaggtaatcctacaagaaatgtgtgcaaaacagaaaagaggaagttacaatgagaaatttcttacgtactatattcagtagagcctcagggtagctctaaatctagatacttaataagaatactactgataataaataatactcatatagcaaatactatgtgctaagcattctttcatgtactttataagattaatatatctaatacaaggactgtatgagatagatattattgtccagttttattatgtcctgcaaataaaatgccctgacaaattatattctctcaatcatctttcctttgtttgcaatcaacattttatatgtattcacttattatgtatcactcctttgattcctcaaaatttatttagggctatataaatattttgctactactggaattagcaaaactttaaggttaaattttcaaacatgttattgccctcatcatactgtagcaagaattagtaatcaatgatacataaaccctatttatttatccgaattattccatttcacatcctcacaaaggacactattctgtcaccatttaacccttgtccccaaaatctcctcataaatgcagtttcaaaaacagcaaatagataaattggactttattaaaattaaatttttttttttggtgaaatggagtcttgctctgttgcccaggctggagtcagtggtgccatcttggttcactgcaacctctgcctcctgggttcaagcgattctcctgtctcagtctcccaagtagctgggactacaggcacgcaccaccacgcccggctaatttttgtattattagaagagatggggtttcaccatattggccaggctggtctcgaactcctgacctcgtgatctgcccaccgtggcctcccaacgtgctgggattacaggcatcagccactgcgcctggcccttaaaattaaaaaaatttttttaaagtttttatttttttgagacagggtctcatcatgttgcccaggctggagtacagtggcgccatcatggctcactgcagtttcaacctctctagactcgagcggtcctcccacctcagccttctgagtagctgggactgtaggcatgtgccaccacatcccagtaagttttgtattttttgtattataggaattggggccaggcacagtgctcactcctgtaatcccaacactttgggaggccaaagtagatggatcacttgaggtcaggagttcgagaccagtctggccaacatggtgaaatcccctctctactacaaatacaaaaattagctgggcatggtggcacgcgcctgtaatcccaactacttgagaggctgaggcacgagaatctcttgagtctgggaggtggaggttgtagtgagctgagaccatgccactgcaccccagcctggttgacagggcaagtctgtctcaaaaaaaaaaaaaaaaagaaagaaagaagtggggtttcaccatgttgcctagactggtcttgaattcctgggctcaagcaacctgcctgccttggcctcccaaagtgctgggattacaggtgtgagccactgcacctggccaaaattaaaaacttctatgtttcaaaggacatcattaagaaagtgaaaagacaacctacagaatgggattaaatatttgcaaattgtgtatctgttaagggtctagtatttagaatatgtaaagaactatcacagctccataagaaaaaagcaaataatccaattgaaacaatgggcaggccaggtgtggtggctcacgcctgtaatcccagcactttgggaggccaaggtgggcggatcacgaggtcaggagatcgagaccatcctggctaacatggtgaaaccccgtctctactaaaaatagaaaaaaattagctgggtgtagtggcgggtgcctgtagtcccagctactcgggaggctgaggcaggagaatggtttaaacccaggaggctgcagttgcagtgagtggagatcgcaccactgcactccagcctgggcgacagagcgagactccgtctcaaaaaaaaaaaaagggcaaagaatttgaagagatatttctccaaagaaaatgtgcaaatggccaaataaacacatgaaatacacacatgaaaaggtgttgaaatcattattcattagggaaatgcaaataaaaatcacagtgaggccaggtgtggtggctcattgcctataatcccagcactttgagagactgagtcaggaagatcacttgagcccagaagttagagaccagcctgggcaacatagggagataggcgtggtttgtgcctgtagttccagctagtcgagaagctgaggtgggaggatctgcttgagcctgtgccgtcgaggctgcagtgagcagtgatggtgccactgcactccagcctgggcggcagagcaagaccctgtctctaaaataataatgataataataataataatagagataccaattcacacccactagaatgactataataacttaaaaaaaatctcaaaaaaaaaaaaaacccaaaaaacaaaaccccaacaactgttggtgaggatgtggagaaatgggaaccctataagggttccttacttatagagatgtaaaatgatacagatgctatgggaaacagtctggcagttcctcaaaaagttaaacatacagttgccatatgacacagcagttccattcctaggtcatcccaagagaaatgacaacatatgtccatacaaatacttgtacatgagtgttaatagcaacaatattcataattgtaaaagagtgggaacaacctaaatgtagatcagctgatgaatggataaacaatacgtggtccagctgggtgtggtggcacacacctgaaatcccagcgctttggaaggccgaggcaggtggatcacctgaggttggaagtttaagaccagcctgaccaacatggagaaaccccatctctactaaaaatacaaaattagccgaacatggtggcttatgcctgtaattccagctacttgggaggctgaggcaggagaatcgcttgaacctgggaggtagaggttgcagtgagccgagatcatgccattgcactccagcctggtcaataagagcgaaactttgtctcaaaaaacaaaacaaaacaaaaacaaaaaccagtatgtggtccatccatacaatggagtattattcagccacaagaaggagtgaagtacagattcatgctgcaacatggataaaccttaaaaacattatgctgagtgaaagaagccacgaaagatcacatatggtatgatcccacttatatgaaatgtttagaacaggaaatccatagagatagaaaagagatcaatggtttctaggagatggggagggaggcaattgggaatgactgttaataggtatggggttctttttaggtgatagaaatgttctggaattagtgtagatggttgcaaaatgtgaatacgctaaaactactgaattgtatactttgaaatggtaaattgtatgctatgtgaattttatctcaattaaaaaaaagtataggccgagtgcagtggctgaagcctgtaatcccaggctttgggaggccgaggcgagtggatcacttgaggccaggagttcgagaacagcctggccaacatggtgaaaacccatctctattaaaaaaacaaaaattggctgggcgtgttggtacatgcctgtcatcccagctactggggaggctgaggcacgagaattatttgaatccaggaggtagaggttgcagtgagccaaggtcacaccactgccctccagcctggtcaacagaacgagactgtcttgaaaaaaaaaagataaattatggtatttgctttggaattaaataattagtaacctttagtaaggtttggtaaaggtttagtaacctttagttaacccagttaacttctgtgtcttatgcttgtctttgtactgaagtagttgaatgccactgacccacagaatgagttgccagagaattggagcaacattctgttgtgggaaagagaatactctgttctaccttaaaattagattaccagcatatcaattgaagggttttaaatagtgagtgatgtgtttcaatttatatttatattatatttacacttgatcttagccaaaagtctgagtagtgattttatattatatttataaagatcactttagctttctcctggagactggattggtagggacaaggtgacattggtgaacttggttagaaagtcagtcaagcccgtgtgcagtggctcacgcctataatcccagcactttgggaggccaaggcaggtagatcatctgaggttaggagttcgagaccagcctggccgacatggtgaaaccccttatctactaaaaatacaaagattaggcaggcatggtggtgggtgcctgtaatcccagctactcaggagattgaggcaggagaatcacttgaactcgggaggtagaggttgcagtgagccgagactgcgccactgcactccagcctgggcgacagagcaagactcagtctcaaaaaaacaaaaacaaacaaacaaaaaaccagtcagtactctagggaagaaataacaatagctatattatgacatagtagtgagttgaagataactgaatagccaaaatatattttggagatagtttgatatgagaggcgaggaaaagtaagtagtcacgtgtggctctttgtttctggctttaataactccagtagttctggaagagacttagtgggaaaattaaggacattttggataaattgagtttgtccaaatggggtttccaagtggagagttgagtaaatgaagctagagctcaggaaagatgtggaccagagttataagtcatatttatttatttatttattttgagacagagtctcgctctgtcgcccaggctggagtgcagtggtgcgatcttggctcactgcaacctccgcctccggggtcaagtgattctcctacctcagcctccagagtagctggtattacaggcgtgggccaccatgcccagctaatttttgtatttttagtagagacgggggtttcaccatgctggccaggctggtctcgaactcccgactttaggtgatcctcctgcctcggcctcccaaagtgtttggattacaggtgtgagctactgcgcccagcataagtcatatttaaaacaatgggaatgggtaggaacacctagggatagagtatgggaaatagagtagggtccagtatacagctgtgccaaatttcacatgtacaggttagatagtggagtgggtcagttctgttgagaatgccctgaaagcttgaataatgataagcacgtccattttaacatcatgaggtagtggtgacgttgtaagaggagtttcagtgtagtgggttgtcatgggttaaaacgttcagattgtcatgggttaaaacgtgaattggatatgaggaagtggagtgtgcaaagatagttttctgaaagttttacttggaagaggacaaaaaattgagactagacagtttgaggaggatgaaaggtcaaggattctaagctagtgataaaaatttcgtcaacatcaatgaataggtaatgtaaacacgttaatcctgggatggatgtgagaagagcaaagaaaggagtcatgggggaatatcagctctaaaggttgagtagagaaggaaggagtgatctgagaggtggaaggaggagtaggaattatcatagaaactttaagcttcttgagggcttgtgactgtgtcatgttcatcattttatctgaagttcttatcaacaaagtagctttcagtaaatatttattaaatgaagacaaaaattttaagagccatctgcaatgtcaaatgtagcccacagttgaatgaatatgaggaccgggaagtgtcccttgattttggagttaagcagctgattgccaccttctgtagaacagcttcagtggagtctccatgatagaaataaatgccaggttgctgaggactaagcgtggatatttgttgagagtggagacagtaagtgcaaacattcttttcagaaagctttgctctttttgaagctttgctcatagggagatacaagatagtaggtagaggggcaggctgtgtttagatgagagagacttcagcatgtttatatgctaaatggaaaaaggaaaaaggaagggagaagttgaagatgtagaataaaggaggtgtgtgtgaatgattgtacattgtctttgaggttagtgggaatggagtgaagatactgggttgcagtacagatgagaatacagtttccactgaagtaggaataaaggaacaatagatggtgcagatggggaagtgtttgggtggcaagtgagaattctggatatcaacactttatttttttcagtgaaggggggataaggtcatccactgagattatagtggggatgaaatgatgattgtaggggactgaggagaaaaggagaatttcaagaaagcctctgagggaagtgagagggcaagctgagtgggaatacttagaaaaaatggaatcatggatttttcacggctgtggtatatatatttgtatgaatgatttcctccttctctcagggctcagcagcctgggtgagcacacaattgaacagttggattggtcttggcctgggttttatgtgtcagtgtgacagagagggtaaggaggcaagatatttcagtagcgagagtgtttgaagtgatgggccattgagtctaggctgaatagggaacaaatgaaaccagaaggtggctgctgggacatgaagtggttggtgttcaagactggatagtggaaatgaagattgaacgggaggagcagttgctgggtatgacagaatacaggatccagctatggagtgggtttatgaagtagagacaacgttcccaagtctttagtgaacatcagagagtgtcatctgttagaactttagctgcggccgggcaaggtggctcatgcctgtaatcccagcactttgggaggccgaggtgggcagatcacctgaggtcgggagtttgagaccagcctgaccaacattgagaaactccatccctattaaaaatacaaaattagctgggcatggtggtgcatgcctgtaatcccagctactcgggaggctgaggcaggagaatcgcttgaacctgggaggtggaagtttcggtgagccgagattgcaccattgcactccagcctgggcaacaagagtgaaactcagtctcaaacaaaaaagaacttttgctcaaaggcaggtggtagcagataagaggtaaggaaaatttagtgaagaaaaattcagtttttaaaaacgttttaggctgggtgtggtggctcacgcctataatcccagcactttgggaggccgaggtgggcagctggcttgagcccaggagtttgaaaccagcctgggcaacatggcaaaaccttgtttctacaaaaaatacaaaaaattagtcaggtatggtggcatgcacctgtagtcccagctacttgagaggctgaggtgggaggatctcttgagcccaggaagttgaggctgcagtgagctgtgattgtgccactgcgctccaacctgggcaacagagggaaaccctgtctcaaaaaacccaaaaaaaacaaaaaacaacattttattttggtgatggaattctctattgtttcgaagagttttgtttgttttaaagacattaaccagttttctcgagggatattctatgaaaaagtgggttccatcatccaataagtttgagaaactgcaaactctatcccgttggtaattcacaatgaacctcaacttagattaataaaggctctgggaaatgatgttactattaatgatttaacatttattgagcactgtctaaggctctgttctaaggctcccacatgcattattgtttccagtctttacagcaactatctcaatttaagtcacacggctaagctggaatggaagagctgggattcaaatccagaaagacttgctccataggattctcaagcctataaccagtatggaaacaggcttgacattaaatccagcatttccccatcttgtttggttatggaaccttattatcttttagtatttatagagagattagtcagttgtccacggcatggaccctgggaagtgttgcctgagtcagtttacactggtgactacagtcttttaaacagcattgtttcagactataactagttttttctaacttggttctctgttgacaatacttaaatgttatatttatttttctatttgagagccttatattttgacttcaaggcattttctattccctttcacaatgaccttcccaggaatcaaagatattgtcaccaccacacattacatttgagttactaaaacagtttataatccaaatagctatttcactttcctttctctggtctaagattatcttactgtaatttgttttttaaatttagagacagggtcttgctatgttgtccaggccagtctcaaactcctgagtagctgaaaatataggcatgtgtcacctcaaccagtttattgtaaaattttaatgtttagagatcttggagatcatcttttatttttagcagtatttatttagttttgcaggtagagaaaatgacagctgtgtagtgctgtggaaattataataattcatatccaagcttgaatgtcagctccacctctttactatagctgtggccttacaaaacctacttcgtttcttgaaacttgtttcttcctctaaaaagatgaggataatatcttgcagggtggctatgaaaattaagacagttcatacagtatctggcacatggaaagttctcaatgttaattacccatttttttctgtttaaggaaatagtctcaatcctataccatgaatgaattatgaaaatagttggaaaggaaacaacagttttaaatgtaaactgtctcagtcttatgctgacatcagctacatttctggtaaagtgatggtgtcatgatacaggttatattaagagttaaaaccagtttccttctggctttccaactgacataataagcaaaacctgcctgggcaaacatagacctatttattggctcacttattattaatgttaaagtagctttggtgctgacttctcctgttcttgttttaaaatttcactgttgtcatttaaaatctgacagaccttcagaagcttcatagaatgcttaatggtttaaatcgtctctagaacatgtgaagtatcttttccaaagtggttttctccatctgtcagtatgttcaaaatcatgtgtatagggccgggtgccggtggctcacgcctgtaatcccagcactttggaggctgaggcgggtggatcacgagatcaagagatcgagaccatcctggctaacatggagaaaccccatctctactaaaaatataaaaatcagctagccatggtggcacgcacctgtagtcccaactactcgggtagtcccaactacttgggaggctgaggcaggagaatcacttgaacccgggagacggaggttgcagtgagccaagatcgcaccactgcactccagcctgggcaacagtgcaagactctgtctcaaaaaaaaaaaaaatcatgtatataggacagaattgcttatattttcacatttactactggatgcctgtttggttttcatagcaatcaacttttggagtttatgggcagtacttaacatatataacctaagtgtggataattatttaaaataaggctattggaagaaaaatctatagggatttctcagttttcacaacaactccctgagcaaagaaaaaataggttggtttgagttgtatttgatgagatttctaatattctatttgaaatgccccctagtaagcactagtgataggtattaatgagctgaatttgatttccagttccaactctgtcccttgcaacttctgtaaccttgaaggtttctctacgtttcagtttcttcatatgtaaaagagattaccaatatttccctcccaaggctgctgtaacagtgaagtgttgaggtttttatttatttattatttatttatttatttatttatttatttatttatttatttgagacagagtcttgctctgtcgcccaggctggagtgcagtggcatggtctcggctcactgcaagctccgcctcccaggttcatgccattctcctgcctcagcctcccaagtagctgggaatacaggcgcccgccaccacgcccggctgattttttctatttttagtagagatggggtttcaccgtgttagctaggatggtctcgatctcctgacctcgtgatctgcctgcctaggcctcccaaagtgctgggattacaggtgtgaaccactgcacccggctgtgttgaagtttttaatatagccagcacagcatgtggcacatagtaggcacacagccattgcatgtttcttccagacatctcactgcatttttcagtaatattcttttcaagtacgttcttctttctcattccttaacatttaaaagctgtattcaagagagaatattaatgtttgccaagtaaactgaaaatatttcctttgcagcccacacttaagagtgttttaggccgggcgcggtggctcatgtctgtaatcccagcgctttgggaggccgaggtgggcggatcacctgaggtcaggagttcgagaccagcctcagtatggagaaaccctgtctctactaaaaatacaaaattagccgggtgtggtggtgcatacctgtaatcccagctacttgggaggctgaggcaggagaattgcttgaacccgggaggcagaggttgcagtgagctgagattgcgccattgcactccagcctgggcaacaagagcgaaactctgtctcaaaaaaaaaaaaaaaagagtgttttagcaaaaaatgattttatgtatgacataccttggtttaaatcctggctttttaattttaattttttattttttgagacagggtcttactctgtggctgaggctggggtgcagtgatgtgatctctgctcactgcaacctccgcctcccaggctcaggtgattctcccacctgagccacctgagtagctgggagtagaggtgtgctccactatgcctagctaatttttctatttttagtagagacagagtttcaccatgttgcccaggctggtctcaaactcctgggcttaagctatccaccagcctcggcctcacagtgttgggattacagttgagagccaccaagcccggcctgaatcctggcttttgaatgtaatagtgttgtgaccttaggcaagctacttaacctatccctaaagtattatgaggctaaagtgagtaatagtatgtataaaacatctagttcattgtctggtttgtatattcccaaaataaatgttattattttaagtggaaactgttgtttaatttgataattcatataattcatggcttttgagagcctgctctactcaaagcccgttaagagcaggcaggaacattgtgaacgaatgttgggcatattattatgcaagtgactgaatttggccttgcctgtaatcaggttcagcaaaagtggtattttctttctttctttctttcttttttttttttaaattgagacagtctcgtcctgatggccagactggagtgcagtggtgtgatctcggctcactgcatcctctgcctcctaggttcaagcgattcttccacctcagcctcccaaggagctgggatcacaggtatatgtcaccatgcctggctaatttttgtattttttgtagagatggggtttcgccatgttggccaggctggtcttgaactcctgacctccagtgatctgcctgcctcggtctcccaaagttctgggattacaggcgtgagccactgaacctggccaaaagtggtattttctattgcatttgaggtaacagaaattgatgggcttgttattgcatttggcgtggcttttttttttttccatgttgtctttctccactgactgtcaaaaaaaaaaaaaaaaaaaaggctacattcatgagtgccacaagagagatttatgattcccaagtgctacagcagaccaaggtatattttggtatctaaaaagtttttcatcttttgctgatcttgtttattagaaataaagatgttactctcctgtattaaaatttaacacaatattggcaagctaaatttaatcaaatattctgcccattttaaaattcacttcctagcctgtccatccttccttttattttgttgtttgattttgttttattgtatgcttttagcagcctgaagccatggtttttagtttctgtctgtagtgataagtggaaaggagggatgaggaaggggctttactggcccaaccagaaatagaaactaagaacccaggactgtattatctcccttggacacccaacactatataaaattgattcctgccctggcagactaagcattggaaagctggtgctaagagtgttatgagaattcctaacaaatagaaaagctcaaggattgacactatagtaaaagatttcattttgacatgtttataatttacttatcaagttaacaataaggtgtttttatttatttatttttgtttatttttattttatgttttgagacggagtctcgctctgttgcccaggctggagtgcagtggcttgatcttggctcactgcaagctctgcctcccgggttcacgccattctcctgcctcagcctcccgagtagctgggactacaggcacctgccaccacgcttggctaattttttgtatttttagtaaagacggggtttcaccatgttagccaggatggtctcaaactcctgaacttgtgatccacccgccttggcctcccaaagtactgggattacaggcgtgagccactgcacctggcctttttttggtatttttagtagagacggagtttcaccatgttggctaggctggtctcgaattcctgacctcaaggcctgccttggcctcccaaaatgctgagattacaggcatgagtcccagtaagatttttaaagggataccaaaataatcaacatttattttagaaggtgactttcttcaatgagatgtcaatgtctactttctgttatatagtgctatggtttcttttttcttttttttctaagtgagggtctcactctatcacccaggctggagtacagtggcatgatctcgggtcactgcaaccttcacctcccaggttcaagcaattctttcacctcagcctccagggtagctggaactacaggtgtgcatgcctcgctaagttttgcatttttagcagttgttggccaggctggtgtactgtttcttttattgactgagatctatatttacacagcatgaaagtctcagttgcattaagtacattcgcattgttatgcaaccatcaccattatctagttccagaattttgccgtcaccctaatagagcttgtatatatgtccccaccaaatcttatgttgaattgtaattcccagtgtttgaggtggggtctggtgagaggtgtttgcgtcatggggcagatccctcatggcatagtgttgtcctcgcagtagtgagttagttctcacgatctccttactccatccacctgcttctcctaaaactttgaaatacgcttggaattgaaagtgtttagtttagtttgaggatagttatctaaaagtgacatacagggctcctgctttgctcttccttagtaaatttcctattttattacacagtttactaatacagaggacttgagttttgttatttccatggaaaacattattgaatctaaatttaactagagatgtgtagttcagggagggagagtggttttataatatgaatcttggatttgaaatgaacttaaagcaaatgaataaaaattgtttcattaattataatgtctgaaataatgcatgtttttgtgaataaaaattgatataataaagtttaaagtgacaggagtagatataactaattgtatttataatttcttggaagtaaaataacatttttgaaaaatattatacaatgacctcacatacagtgacctcacttaatctatgtgaggctatacacagtggctcatgcctgtaatcccagcactttgggaggctgaggcaggtgattgcttgagcccaggggcttaagaccagcctgggaaacatggtgagaccctgtctctacaaaaaatacaaaaatcagctgggcatggtgaggcgcacctttggtcccaactacttgggatgctgaggcaggaggatcacttgagcccaggaggttgaggcagcagtgagctgtgatcgcaccactgcactccagcctgggtaacagaatgagaccctatctcaaaaaaaagaaaaaagtctatgtggaagacaccgcgttaattgtgttgggtggtttagagatgtttctgtctccttcactgatgaccgtgtgtctctgctgctgtcgctcactggtgattatcaactcaacctcttatatttgttttaacaaatatttatacaccctttgtaaatttgcgtgagataaagtcattatagttaaaaaaaattttttttttttttgagacagaatcttgctccattgactaggctgagtgcaatgacatcatcatggctcacggcagcctgaacctcctgggctcaattgatcctcctgcctcagcctcctgagtagctgaaactacaggtgcatgccaccatgcccagcttgttttttattttttgtaaagacagggtctcactatgttggcaggctggtctctaactcctgggttcaggtgatcctcctgcctcggcctcccaaagtgttaggatttcaggtgtgagccaccatgcctgtcctatgaagtcattacaaagaaataaaattaattggtttcattggcagtattgaatttcaaagcagaaggggtgcttaagagaaataatgcctttggagtgatttctgatgctagatgaaactcatatctcatttaaggtgtccatctgaattttatgtttggatgattgtgaattattccttaaagcttgaagtgaactctggctctctaggataaattaatctttattcctttaatctttattcccttagggatatattaaagggatcaaatttttttttagagtaatgtaaaattaagggacttcttttgttaggtgaatttctcaggttttaagatatcagtatcattgtggacattgactacattgtctactaaattctgtaattttaacttataattctcagtaattggctgggtgcggtggctgacgcctgtaatcctagcactctgggaggccaaggcagcagatcacctgaggtcaggagttggagaccagcctggccaacagggtgaaaccccgtctctactaaaaatacaaaaaaatgagccgggcgtggtggcgggtgcctgtcatcccagctactggggaggctgaggcaggagaattgcttgaacccaagaggtggaggttgcagtgagttgagaatgtgccattgcactccagcctgggtgacaagagtgaaactccatttcaaaaataaataaataaataataaaaataaaaatacaaaaattagctgggtgtggtggcgggtgcctgtaatcccaactactcgggaggctgaggcaggagaatcgcttgaactcgggaggcggaggttgcaatgagccgagatcacgccactgcactccagcctgggctacaagagtgagactctgtctcaaaataataataataataataataattctcagtaatttttgcaatttttttggtacctaaaataatttctgttattgtgttggataactttgtcaacttcactttgggaatatctaaatacaggtagctgcattcgagccagaggaatattgggtttttttgttgttgcttatttttgaggcagccttactttgtcacccagactggagtacattggcacaatcatggctcactgcagccttgaccttctgggctcgtgtgatcctcccaacccagcctcccaagtagttgggactaaaggtgtgcaccaccatgcctggctaatttttaaatttttttgtagggatggaattttgctatgtcacctaggctggtttcaaactcctaggctcaagcagtcctcccaccttggcctcccaaagtgctgggattacaggtatgagccaccacacccagttgagaaatactgggttttaatcaagattattgtctgaatattgagtcttaatgacttttttgattttgtttttttggccatagtattaagtttgcagttgataaccttctgtactaactagaagtagtatagaaactgcaaattaaaaaaaaaaacccaggtaaaatgttgatggctgctatttttatttaaggtattaataaaggaaaagaagtcagggacattatggaggtcaagttttatattattaaaactcaacttcatgatttatacatacttagaaatagtctgagtgatgtgtgaccaaaatatgatttctaggaggaatgattgttacatccgtggaatagctgcgtacactttattgttcttggtgcttaaactttagttgtcctgctaagataaaggaagacattctttcagttggaaatcatgataatgtatttctccattgaaacagtatggtttgaacagtgctatatattcatactcattattattccttaaatgaatattttaagctcctgatagaaggcaggtactgtgttatatgctgtttgtgttaccagaatacaaagatgaagagaacaaagtattacacaattcctaatctcacataaatgctattttttttttactagctgtggggagcacaaaataagtggttgaaagtcatctgacacagttacatttattcctttccttttccatggctcttaggaataaattgttctactctatggattaaattgccctttgtttattgcctgggatcccaactttatttcataattttatttctttgaggaaacgtttcacaagttttataacaaagtataactcaatttggagagcacaatctgtgcataagttggaggctacctattgtgaaatggaaaaatgcttgtcctagcattactgagttaatgtatagctggtagaaagttttcactcttaattgctaacttgcctagtgagagtgaaagattgattacggcaactaaaaagtataaaaactactgagtagtttttaggtacagtcagttcttcagtagaacaagaatctttagaaataactttcactaattctttactagttgtttttcctatttctcttggatatggatcatcagaatgttttttgtccctcttacccgccccccccatcccccaccccccgcctcccacttttttgttgggaggcttatgtgagagcattagaggccttgaatgtttgggtagacaaggtaagtattcaaataaacgtttcaagatcattgtgacagtgaaattatttgatatgaaaaaggatctcagttattagaaaaaacacaactgtgttaatactgacagccagcgttgctataagtgttttatgtgcattatctcacttaagctttacaacagtcctaagagaggaatgctgtggttattacacccacttgacagaccagggagcagaagcacagaaacccaaggatttctgctgtcaatgtcatgcatttggctggagttatgatgtcgtgcaagtaatgttccttctttttccctctaattcatttttatgtttttcttttacagggcaattttgtaagatttagtttccaggggtcaggtttgtttgggctttatgtccttgggaaatcctcagtaccttatttcccatattccatactttttaatcttaattttttttcccctcaaatgttatacagtttaatgagtcaagtggtctttcagggattcttaaaacaaacagtaattctcagcctccaccttcatttcctcttctcataggtaaccatcctcaactcataggtatttggaatttacctgcggtttttcaagaaacatttaaaaaattgatttacttgaattttcaggttagaacataaattatttgcatgatttgctgtgtccttgtgactaactcaacctaaacattctatcagttgtccaaatttcccattttctttcaaatttcccatttccttcacttactttgtcagtttcatcatcttgaagaagacttttccagagcacagtgctccaacatggagtagtctctgttttctcatagtgcccagcaatcatccttggaattctcttttcttttctcctgcattggcacttctgtttcttctcctcttatgtcttcctgtttcatgggaggcaaatatttgataccttatgttttctgaaaacactttattttcctctcacccttcattagtggtttcactgtatgtaacattgagattgatgattttgctccattgtcttctagcttgtgttatgcctgttgaaagtacaaaatcattctggaagtttatctattgttagccatttccctcttctggaagcttgtaggatcttccctttgtttccactgttctgaaacttgtaaatgatacgctttaatatggttgtactgtattttaaacaattatgctctgcactcagtgtttttttgttgttgtttttgttttttaatttttaaatttatttatatatttttaaatttattgtttttgtttgttttttgagacagaatcccactctcgcccaggctggagtgcagtggcatgatcttggcgcactgcaacaacctccgcctcctgggttcaggtgattctggtgcctcagcctacccagtagctggaattacaggtgtgcatcaccacgccaagccaatttttgtttttttgttttgttttgttttgtttttttgagatagagtatcactctgttgcccaggctggagtgcagtggtgcgatctcggttcactgtaacctccgcctactgggttcaagccattctcatgcctcagcttcccgagtagctgagattacaggtgtaccaccacgactggctaatttttttgtatttttagtagagacagggtttcaccatgttgggcaggttggtcttgaactcctgacctcaaatgatccactcacttcggcctcccaaagtgctgggattatgggcgtgagccaccgtgcctggcttcactcagtgttttcagttacgaaacttacattgtttagttttgggacattttcttgaattatttcactggttttttttcctctctgttttctcctgtggattccccattgcatagatgctgaattatcttgactggacctccagttttttcttcttgattctgttgccatctctttgattccttattctttctgataaattttcctaagtttaatttccgagagctctttggaaaagtatcgattttttttcatggatggagtatctactcttttgacacagggtcttgctctgtcgtggctcactacagctttgattgctcaggctcaagcgatcctcctgccctagccctcccagtagctggtactacaggcctgcaccgccaaacctagctaacttttttgatttttagtagacaaggtctcgctgtgttgcccagactggtctcgaactcttaagcgccaagcatttctcttgcctcagcctcctaaaattctgggattacagtgtagtatcttctgtattctttccatggacgctaatgatggggtataaaattccttttatttatttattttttattgacatcagaaattcctgctaataaaattctttttaaattttaagtttttttcttcccacagttgtccgtgtttcctccaagttccttttctattttttgttttcctttgttttctttttgtggtagatgctttcctcagatgagtggtaatccttggctgtttgcagttatgcctctaaaagctgattggaagctcttagtacctcattggtacttgttgactagagttcactctagggtgatctatctgtgtcatttgctggggcacccttcatgtcagcttctgattacttttcccttttctgaaaagggagagaggtcttttaatttcctgtctggtgggaggaggtctgtatgccacttctgtgagagagtgagggaagtagggcagtgaggatttcagtattcagtacatatgtgttttcttaaggcctctgttttcattaagcctcccccgcaccaatgtgctttatgtttccctgctctgaaatcctcctgagggaataatcctctagaattttgccttggtgggaaaagcatagtaacctaaccatgtggtatttaggaaggtactgagagattgagcgtttcctaaggagctttcagccagccttctttatttagtgctcccttcacacctgtttctacaggcgctatctgttaccagttcctgagccttttgaagattccgtggacgaaggttggtttttggctttccatactgctggtttcttggatctgctatgtcagttaccatttatgcatttgctttctagcttttaagttttgtttatgccttaaaaatacctgatgagggccaggcgtggtggctcaggcctgtaatcccagaactttgggaggtcgaggcaggtagactccttgcatctgggagtttgagagaagcctgggcaacatagcaaaaccccgtctctactatagaaaaattaacccggtgtggtggtgcacgcctgtggtcccagctacttgggaggctgaggtgggaggatcgcatgagcctgggatgtggaggttgcagcgtgctgagatcatgtcactgtactccatcctgggtgacagaatgagaccctatctcaaaaacaaaaacaaaaaaaccccaaaaaccttattagtattttagcacaatttggggaagaaatgaagttaaatatatgtatgttccatcttctctttacccagaacttatttctaattttttttttgttaagcatcttttttgttgtggtaaaatatacataaaatttattatttataagtatacagttcagtgacattaagtacattcacaatgttttacagccatcactactttctagttctagaacttttctatcacaccaaaaagaaaccccatacccattaagcagtcactccccattccctccctcccccagcccctggaagccacgaatgtgctttttgtttctatggatttgccttttgtggatatttcatataaatgaagtcattcagtatgtggccttttgtcacatgttttcatttaccataatatttttgtggttcatctatggtatagcatagatcactgcttccttcttttttatggctcaataattttcattgtgtggatatatcacattttgtttatctgttcatcagttgatgaacttttgggttgtttctgctttttctggctattgtaaatagtgctgttatgaacactgatgtacaatttttgggggtgaacatttgtttttattcttttaggtatatagctcggtgtggaattgctggatcatatatggtaattctgtctttaacttaatgaggaactgccaatctgttttcctcagtgactgtaccattttatattcctattagcaatacacaagtgtcccaatttctccacatttttgccaacactgttttccattaaaaactttttattatagtcattctagtgggtgtaaagtggtatctttttgttttgatttgcatttccccagtaactaatgacattgagccttttttcatgtgcttgttggccatttgtatatcttctttggagaaatgtctgtttaagtcctttgcccactttaaattgtgttgtctttgtgttgtagagttgtaagagttctttatacattctgggtactagacatgattttcaaatttagatacatgattttcaaatcttttgcctctagatgttttttacttttttatttttgatccttgaactcatctatattctatggttgtgatgtaatgatgacagaattggtgtcatttgtgtttatttaccaggttatttggaaggattatattttaggtgctctcctctcccccagtaaatggtattacgacacaagggttataaaggactgataagaaattacttaagacagaaagggaagttggcctgcttccaaaatgtggtcccagcagaagtgaagttagttacaccaataaccacagtcaaaaagctatttttaaccatgataatgtatttgttgttattaatattaaagattatattttgccaggtgcagtggctcacatctataatcccagcactttgggaggctcaggcggatggatcacttgagctcaggagtttgagaccagccagggcaacatggtgaaaccccatctctacaaaaaatgaaaaattaaccgggcttggtggtgcgtgcctgtagtcctagctacttgcgagtctgaggtgggaggatagcttgagcccaggaggtcaaggctgtggtgagccgagatcgtagcactgcactccagcctgggcaacaggacaagaccctgtctcaaaaacaaaacaaaacaaaacaaaacaaaacaaaaccgactatatttctgcattaagtgggggtttggaatcctatctaatatttgagataataattgttatagtattttattgagcttttattgggtaccagatgtgttctaagtttttttcgtgaattattttcattaatcttattcattgttgtgtcctgaatgagtactcacatatttgttgaagggctcaatggtccctaaaaccttagatgctgttttggaaggttaacttgccaaaggtcacatagttggcaaatgatgaagctgagattaacattaagatctgattccaaagtagtctttcttaactatattgctttatgtggagttttgccattgatgtctagacagaaaatctctagcaatggaaaaaaataatttttaattaattttaatttttttagtgttttgcttctttttttttttattttgtgagccaccgtgcccaattggtttcttttaaaagaccagttagtttgtgcattaggcctcttgattaatctgaggtatttaattaatatctttgaaatccttagatttactgtatcacttctgcaatatctaaatttttccttcttacttatttctgttctccttctacagtcctttctattatgtttaatcatcaaaacgttgttcttgttttctattgcaatctaatttttagtgttatgctgtttccagatgccatttgggtcattttcaaaaaaagatgagtaataattagcaagtaatgaatattgttctttttaccattcattaagaacaattgttaattgtcttattctattgtgaagaatatctgtaattcctgcttagaacctgggttgatagcaggatatcaggaagcactaagtgtacacagaacgatatagctggaaaaagtatatatgttaaagaataatatgttgtctaaggatgatcacacaggttcttttttggtaagcttcaaaacttcttatctcccatgaaagtactttttcttttataatatgcaacaataactttctgtttagttaattagttttaaaacaagcttaaacttataatttataaagaatcatatttgctccctatcattgttttatagctggggctatactgacaaataagaaaaataaaattcctgcccttgtggaggagacagttaaaaaatgggacaaatacatttcagatggaaatgaggacaatggaagaagagtagagcaggatgaaggcatgaagggtgactgagatctggtcaatctttagatagtgtaatacgggaaactgctttgaaaagatgacttttgagcagagaccttaatgtactgagggagtgaaccattcgaggtctggggaaagaattcagcttcctcttcagatgtacaaaattacaagatattgccattcttgtaactgaaaacctataaaagcaggataagaagtacggtttctaaaaacccatcgaagagctgaggatacaagggagcctaaatgaaccaaactccagaaagtaatcaaactttcatagtggagaagaaacccatggttgctctaggatggaacaacgaaaggaataggaatccaccatagatgaggggaaaggagaaaccagccacatttttttaaaatcagatttttaatggccacgtatgggctggtttgacaggttaggatcctaagaagccctagcaactctggcaccaaagagcaagtatgcacccacactccagctcctacccacagatgttcactgaatgttcaggagtagtaagccaaaagcctgggccagtgacgaactggcatagataatacctgaggcatttggaacctctcccaagtatagggcaaccacccttagaaggcaggattgctgagaaaaatccagcagaggctctccaggctttcagttctggaatgctgcaggcaggggaagagctagaaataactctcaccccacactctggcagtccatgttttcagccaccaaggactggggacagggcagaagaggtgagtgaaactgctctaattcatttcaggccttcacagaatgtaaggaagctgccctccagaagcctggctggggaggaggagcagggctgcacgagggcacctgagcttcagaaagcaaggtgtgcgactggagagcaaggagaatctagcaaaccaaactctgaccgtggcgcttaatgcagagatagagttcctacagcttttttttctttcttttttaaaatataaacttgaatttttgaaacagtttcagatttaaagaaaaattgccaagatagtatagagagttcccataatgctgcctctagtttttcctatttttatttaatttatttatttttttagtttttcctatttttaacaccttatattagtatggtatatttgttataattaatgaactaatactgatatattttcattaactaaagtccatactttatttacctaatgttttgggatcccatttagctgtcacgtctccttagggtcctcttggttttggcattttcttagacttgagcttctcatctcttgtttttgatgactgacagttttgaggagtattgttcaggtattttgtagaatgtcattctattgatatctgtttggtatttttgtcattgttacagtgaggttttgtatttttgggacgaagaacatgcaggtgaagtacaatttgctttcctttttttgagacagtgtctcactctgtcacccaggctggagtgcagtggtatgatgacagctcactgcagccttgaactcctgggctcacatgatcctccctccttagcttcctgagtagctgggactacagatgcatgccaccacacctggctaatttttttttttttaatagagacagagtctcactgtattgcctaggctggtcttgaactcctaggctcatgcaatcctcccacttcagcctcccaagtagttgggactacagacatgtgccactatgcttggcagtaccattttcatcacatcatattaaggggatatactgtcaatatgactaatcagtgttgatattgaccttgatcatctggttgaggtagtgtttgtgtatttctttactacaaagttactcttttttctcctctgtttacatactgtactctttggaaggaagttacatatgcgcagcctacacttaaggcatggggagttatgatacccctcctcaagggcaaagtgtctgtataaattatttagatttcttctgcatggaagatttgtctcttcttcctcatttatttatccattcaatttttaaaatattagtatggacttatggatattttataccttgggttaaaatcttattattgctttatttattttattgttcaagttgttccagctttggccactgggagctctttcagttggtatgactttttgatataccactgtcagtatatgtgtgtatgtgtgtttgcactttctcactttctggcactacaagatgctctagtatatttagagactaaagcatgtagtatatgctttagtatatgctttatctagtatatttttctgtctcaatcctagaattagccatttctccatggagccttggttccttttactggagaatggagaaaccaagatctaggtgctaggtgtacatgttgctactggggtgtttttgcttgtaggccatctcagctgacagagccagaaaatgtatgtatttatactaccctgtatatatccacatatctataaatatttctatatgtatccatccgtatctaattaagctaaacatgagtttatattgatgtattaggttccagttgaatcactacatggatgattctaacttcctgcccttgcttatctgaaaactcctgctccaatagtgagaaatctgtctcctaccatcagccacccatttacttaatcattctactctagtatacatgtaaggtactcccacagttttaaaaattggtggcttggctatgaaacacaagcaggtctctgtaattttacctaggctcagatcccagacctgctcaagtgaaaggcttgatctcagtccttaaatatttgaagccagtgattaatgttaaattaaagctgcatcatagcccacacccagctcagttacatattggattgactcagactcccttctagtgtcctaacagaaaaattgtcatgtctttttctggaagtaaaatattacttaatttaataagtaatctatttttatataaaatgtctggtgtgtaatgaaaagttacaaggcacaagaaaagcaagaaaatgtgaccaaaggtcaagagaagaaatagtcagtagaagaagacccagagatgatccagatttatcagacagggatttaaagataattatgaaaaaaatgctagatgattgaatgataaaggttaacaatatgcttgaaaagatggggatttctgtagagtcatggaaattatgccaaagaaccaagttgaaattctattaaatagaggtgaaaaatatactagcagagaccagggaaaacaaaaaaaggaaagaaaagaaaaggaaagggaagggaggggagggaagggagaaagaaaaatatactagcagaaatgaattcattacatgggcttaacagtttatggacatagcagaagaaagaatcagtgaatatgaagacagattggaaagagaaaagacagaaaaagtcagggaggggtagaaaagagattttagatctgtgggataatatcagatggtctaacatatatgtaattggagtttcagaaggagagaagagaacgtggcagaagacatatttgaagagacaatgctcaggaacttctaaaattgatgaggtcatcaattcacaaatggaaggagttcagcaaatcccaagcaagttaaatacaaaacaaaaataagccaacaaatttaaaaatcccatatataggcatatcataatcaaactgctgaaaactgaagatggaagagatcttacaagcaacaggagagcaacaggagaataaaagacacattagttatgtgagaatggcaacatgggttatggctattccatgttttaggaccagaaaaaaatggagtcttagctgagcatggtggcacatgcttgaacccaggagtttgagtccagcctgagtaaagtagtgagaccccatctctatttaaaaaagaaaagaagtccaggcacggtggctcacacctgtaatctcagaactttgggaggtgggcaaatcacaaggtcaagaggtcgagaccatcctggccaacatggtgaaactgcgtctctactaaaaatacaaaaattagccgggtgtggtggtgcacacctgtagtcccagctactcgggaggctgaggcaggagaatcacttgaacccaggaggtggaggttgcactgagccgagatcatgtgccactgcactccagcctgtcgacagagcgagactcagtctcaaaaacaaagaaagaaaagaaaaggaaaaatagaatgttaaatacaatgggatgacatccataaagagctgaaagaaaaaaaaaaaaaacaacctgttaacctagatttctatggccagcagaaatagccttcaaaaataatggcaaaataaagactttttggacatatcaaaaagggaaagaatttgtttccagcagacctggactcaaaaaacattaaaacatacacattaacaagatgtgggttttacagcatatatgtgattatacaaccatgaaagaacaaaaaggaggagatggaattatactgtcatacatttcttactctgtgaaaggagactgtagtaacttctggatgcatatgtaatctctagaacaagcactaaaaacacaaacagggataccataaagtcagtacatctgcccaagagggattaaccgctacgagaatcattctcctactgtaaacagctagaaaacaggacaaaaatacatgaaacaactgttttcagacattggacaacaggcagcacaggatagtgatccctgagagaagggaaataactgatatgaaccctacaggggttcctataggcagtttccagattgtagcacagagtaggggaatccaaatagagcccaggagagtttggagaagtcaaggcaactagaatttgtggggcagaaaacaagaataaaaggaactacacagaaatctatagaagtaagagaatctttgattggacactcatctgcacatgtgaagtgtggaagtcagcaatgctggagaaagtcacactggaaatcagaacactgaacaattccaggagctcacacagagctgggaatagtttatgtttccattaggcatagtggagagactgtttcatacaaaggacattggctagagtcttcaaagtggggttaaattagctatagactaaaggcctttctaaacctaccctaagcttcaaggcaggttttgaaaggaccaggctgattctaagtaactcaattatgtgccaaaactaaactcttttaaagaatacagtaaatgccagcacctaacaattaaaatgttcagcattaataatatattaatgaaagattactaggcatacaaataaaaagcaggaaaatgacccataaccaggagaaaaatcaatagaaaagagacctagaaatgtggaattattagaaataattctgatgattgaattatcagccaaatatgttaatacaagtattataatgactagtagagaaatgaatgatagataaaaagacacaagccagatgtggtgaatcatgcctacagacttgagggtaggcagatcagcttgcccaacatggcaaaaccctgtctctactaaaaatacaaaaattagctgggtgtggtgggatgtgcctgtaattccagcttgggaggctgaggcacgagaattgcttgaacctgggaggcagaggttgcagtgagctgagaacatgccactgtactccaacctgggtgacggagtgagactttgtcgcaaaaaaaaccaaaagactcacaagtagtatctaaagatgaaaaataccagatataatatccaaaactgggggaaaaactggatgtgattaacagcagattagacactgcggaaaaaaagatcattaaatgtgaaggtatagcagtagaacctattcacattgaagcacaaagagaaaaaaaatactagaacaaagttaatagaacatcagtaaccttgggacaatagcaagttgcctaatacatgtataattggagttccagaaaagtggggaaaggtagaaggaattactttaggaaacagcgtctgggtggccaggtgggtggctcacacttgtaatcctagcactttggggggccgaggggggtgcagatcatttgagatcaggagtttgagaccagcctgtccaacatggtgaaatctcttctctactaaaaatacaaaaattagctgggcttggtggcatgcgactgtaatctcagcttcttgggaggctgaagcatgagaattgcttgagccagggagatgtaggttgcagtaagccaagatcatgccactacactacagcctgggcaacagagtgagaacctatctcaaaaaaaaaaaaaaaaagaaaaagaaaaagaaaaagaaaataagaaaatagtggctcatcatggtggctcatgcctgtaatcccagcactttgagaggctgagatgagaggattttttgagcacaggagttcaagaccagcctgggcaatttccttaaaaaagaaaaagaaacagtgactataaattttccaaatctgatgataaccataaactctcagatccaagaaactcagtgaactctaaatagaataaacaaatataatcatacctaggtatgtaataataaaattagtgccagtcatggtggctcatgcctgtaatcctaacactttgggatgctgaggcccggagtttgagaccagcctgggcaacatagtgatacccctatgtctacaaagattaaaaaatagaaatataaaaagttagctaagcatggtggcacttgtctgtaatcccacttacttgggaggctgaggtgggaggattgcttgaactcacgaggtcaaggctgcggtaagccataattgtattccacccagggtgataaagcatgacgggagatcctgtctcaaaacaaaacaaaaccaaaaaaaggcgaggcacagtgactcacacttgtaatcccagcattttgggaggtcaaggtaggatgatcgcttgagcccagaaattggagacaagcctgggcaacatagtgagaccctgtctctcaaaaaaaagtttaaaaaggcgggcatggtggcatgggcctgtagtcctgtctactcaggtggctaaggtgggaggattgcttgagcttgggaggttgaggctgcagtgaactgtgttcgtgccactgcactccagcatgggagacagagcaagatcctttctcaataataacacataaaccaatgttacaatgagaagaaataaattctggtgttcggttttttgtttttttttttctgagatggagtttctctcttgttgcccacgctggagtgcaatggcatagtcttggctcactgcaacctccacctcctggattcaagatgattcttttccctcagcctcccaagtagctgggattacaggtgcatgccaccacacccagctaattttcgtatttttagtccatcacgttagccaggctggtctcaaactcctgatctcaaattctggtgttctattgcacagtggggtgagtatagttaagagtaaaatattattacaaaatagctggaagaggggcttttgaatgttctttcactaactgctctgattggatcattatgcaacatggatatgtatcaaaacatcgaactgtggcccggcgtggtggctcatgctggtaattccagcactttgggagtctgcggtgggtggatcacctgaggtcaggagttcaagactagcctggccaacatggtgaaaccccatctctactaaaaatacaaaaattagctgggtgtggtggtgcatgcctgtaattccagctactcgggagactgaggcgggagaattgcttgaacctgggaggcagaggttgcagtgagctgagattgcgccatcgcactccagcctgggcaacagagcaagactccatctcaaaaaaaaaaaaatcaaattgtaccccataagtatgtacaattacaatatgacagtttaaaaaataaattaaaaaaaaattctcttgtacttaccagctgaataaaaaataaatttttaaaaggagagaagtcttcttaaaaaccagttatttaccccatcattaagttataatgaactttcttatgggaattctttgataaggaagctcctttatgctgaagttttattcttttcatacctctttagataaatcagtgctttaggagcatatgtcatatgactcaatggcagtgttctaacttggattctagctccacattgtgcaaaggcaaaaaaccagagagtcagtgtggtagttaagaacttatgttctgctgtttgatttcctacatgccagtactccctccactacctgcagtcttcctgacctggggcaagttccttttgtaaactctgttttctagggggatggtggtggaagaaggatggtgatttgagccaggcagtagcaggtggaggtggagaaaagtggtcaaaccctgaatgaacgttaaagataggaccaaaaggatttgatgagaaattggaagtagagcacggggaaaaagaaagatatcagtgatgatgccaaggtttttggcctggggaattgggatagtggagttgttatttgctgagtatgacttttcacaaaggaatgtcaaggcgtaagtagcaaagttctttttttttttttaatttttcttgattgtgtttgttttgtttttcatcttttgtgggaggtgggtggagatgaaagcaagcacaggggttggcaggcatacccctggcacctacctgtgagttcatgattactagtcttaaagttcagtcctttttatttttactttttttttttttttttttttttttagagacagtgtctcactctgtcatccaggctggagtgcagtggcacaatcacggcttactgtagccttgatctcccaggctcaggtgatcctttcacttcagcctcctgagtagctgggactacaggcacataccaccctacccagcaatttttttaaaaaattttttgtagcgacatagtcttaccatgttgcctagactggtctcgaactactgagctgaagcaacctgtctgcctcagcctcccaaagtaaagtactgtaattacaagcttgagccaccgtgcgtggccaaattctggccttttgatgttgcatggtgtggatggggaggcaaagtgtgatattttaggaatttgaggatttcttcttcgaccttaggcgtgacattggacaaatgacatctgggctgagacattttctagtaatgctggatccaaaaaactcttatcccattgtctcatagcttcattacacagacctggcggccatgatcctcttttttcccccttagttgccaaacatgggttctctgtcttacctcatttgagtcttacctcagtcttgagagtctcaaatgtgtatcatagtttttagacaaaattcaaccttatttcaattagtatttcattgttatttaaatattttaacaggaaaactgagcaatgtttccctttacctgttaatcctgttataatattttagataaagtgtattagaaggcacattcttcattaatagaatatttattcatgtgtttatatggttcttaactaggaataccatatagtctatctccaaccctttgagaaggaaaaaagatcctgactaaacaggacaccagaagggcatgcctaaactaggactgttctgggcaaatcagaaggcatgttcaccttattctttttattctttctttttcttttttttttttttttttgtgacggagtctcgctctgtcgcccaggctggagtacagtgacgcgatcttggctcactgcaacctccacctcccgggttcaagcgattctcctgcctcagcctcctgagtagctgggactacaggcacatgccaccatgcctggcaaattttttgtgtttttagtagagacgggggttttgtcgtgttagccaggatggtcttgaactcctgacctcatgacctgcccacttcggcctcccaaagtgctgggattacaggcatgacccactgcacctggcctcaccctattcctaaggccagaaaaccagctagagtaaagttcactttctgtttgagtgcttggactttattgggagaaggcaaatgccctggaacaagagtgaaagggagaaattcccgttgtattgcaagccagaataagagaggctcacccacactggcctaaggcatctcagttgttgatgagaatgtgattacagatgtctcacttgaataccaaagacaattgcaaaggaaattaaaagttatgcaaagagagtcgagaagtcagttgtctgctcacaggttggctttagtggctattactttgagatactaaatgagcgatagctttaaacttcaactgcttttgtttctgaggaaaaaaatcatcttatatcttttcataagttgcataaaaagtggacattttctattattttaaagagtaaatttaggtacaagcatttactaatttttttttttttttttttttttgagatggagtctcgctttgttgcccaggctggagtgcagtggcgcaatcttggctcactgcaagctccgcctccctggttcacgccatgctcctgcctcagcctccagagtagctgggactacaggcgcccgccaccacgcccagctaattttttgtatttttagtagagacggggtttcacccttttagccaggatggcctcgatctcctgacttcgtgatctgcccgcctcagcctcccagcatttagtaattcttaaaagagttcagcatgaatatacacagtacgtgggttattagtactgtgttgttaacacaaatgaactatgatagcaaattgaatttggttcaatcaggtcaaagaataaaaggatgactttctttaaccaccagcaaaggatagtataatgaaccccatgcaactatcacttaacttcaataatttcaagtttgagtaagttgcagagtagtaatttgaacccacatctctcttgttccaaatcccttgcttttaattacaatcccatgtggcttctttgtcatttgatgctattgagcaactttatgatttttttggtgtttttggtaaaatagacatgaaaaggcattactacagggagttttttcactccctggtaataagaggggaaaagcactctcttttaatgatacatgttttgtaataagcatttttttttagttgcagtgttctgcaaagacaaaacctgctgatacaattcatcctgttttagaaatctttgacccattcatcagactctgaccactctaaagataaaggattatggttgtattggtttttccgactgaagcggccttctgcagattgagaaattgtataattattaactgcggtaatggagatgtacttgcaagtttcatctggtatcttaatgacctttaaccctctgagtacacctaaaacatatcctagaattattgaaattaatcagttgtccataacttttctgtctgtataatttggctatcatacatattttgtttccccctgcccttgccagtttccatcctcctactcacatactcacaactcctataaattggagtatttagtagcagtagcctttgatataaacactttttaaaaatttactattttttgaattaatagggccactttctagtcaagtttttttttggggggggggtgaggagggtagggtaacagttctacacttacaagggtatttgtttagaccaagcttgttcaacccacagcctgtggggctgcatgtggtccaggatggctttaaatgcaacccaacatgagtttgtaaactttcttaaaacattatgagttttttttgagattttttttgagacagagtctcgctctgttgtccaggctggagggcagtggcccgatcttggctcactgcaacttccacctcctgggttcaagcgattctcctgcctcagcctctggcgtagctgggattacaggtgtgtgccaccactccaagctaatttttgtatttttagtagagacggggttttaccatgttggccaggctggtctcaaactcctgacctcaagtgatctgcccacctcggcctcccaaagtgctgggattataagcatgagccaccgcgcccagcctgcgattgttttttttaagctcattagctatcattagtgttaactgtattttatgtgtggcccaagacaattctccttcttccgttgtggcccagggaagccaaaagattagacacccctgatttagacaaataagtgaaggcacactgaaataacagttatatataataaccttgtgccacccagcgcggtggctcatgcctctaatctcagcactttgggaggctgaggcgggcggatcagctgaggttgggagttcaagaccagcctgacttacatggagaaatcccatctctactaaaaatacaaaattagctgggcatggtggtgcatgcctgtaatctcagctacttgggaggctgaggtaggagaatcgcttgaacccaggaggcagaggttgcagtgagctgagattgtgccattgcactccagcctgggtgacaaaagcgagaatctgtctcaaaaaaaaaaaaaaagaaaaagaaaaaaaaacacaaaaaaaccttgtgttttgtggatctcacattcatctcagatatttcttgccctgggagatcctctgaattctcaggactgcttcgtgtcatccctttatgctctactatcttcccctgcctagaaggcaagtagggctttgaatctcacctttgattctactgtgatcctatcaaatatagtaatgctagaaatataggtctgaagtttgggagagagattggctcggtatagatatgtaaagcacagttgtatatgtggtagttatatgaatgggattggatgaaattctctagaggtgtgtggaatggaaagaggtggcccaaggaggaagagagagagagagaaattggagaggtagaacaatttaggaaagagtaatgttctagaaactaaggagagagtttcacaactgcagtggtgaagcactgtgagttcttatttggcaatttggacttcattattgtcttatcacagataggaaatgaaaggttgcagaacatttaggagaaaatattaagtgaggacacagaagcagtaaatgtcgtatatgccttttaaacattttggagattacccatagtaggcctgtcccttgggtaaggcaattagggcagctttcctgggccctattttggggtggggaatgactcggggactttattatatgactttttttctgaacattaataaaattcagtttcaaaattttgtgattaactgtagtcctaagagcctacgaaaaatgcagataatgggcagttccacattggttgaactgccccaggcttctctcttctagagatgctgtcccttccttttaatcctgtagtagctcctatcactttttttttttttttttttttgagacagagtcacccagactggagtgcagtggtgtgatctcagctcactgcaacttctgcctcctgggttcaagcgattctcatgcctcagcctcctgagtagctgggattacaggtgcgtgccaccatacctggctaattttcgtatttttatgggattttaccatgttgcctaggctaggcttgaactcctgacctcaggtgatccacctgcctcagcctcccgaagtcctgggattacaggcgtgagccaaggctcctggcctcctgtcactttttataattgtcagtttgtttttcctctcagaaattaagctccttaaagctctctattattgttttgaattcccagggcctagcataatgcccagcacgtaatgtttagtgtttgttacgtgagtgattgaaggaataatccaatacatatctgtcttaagtacaaaagaattccaatatggtggtctcacagagtcaaaaaagcggaatgtttcagaaaagagggattgataaacagtttcaaatggtactaaaagtattgaaaactgacctttggatttggcttctagaaggtcattggcttccatagtgaaaacttttataacaaaatggttggagtagaagtggttgaagattaaaggagaaatgagatgtaagaaacaacaaacaagtttgtgggggcgggggggttggttttatttttaaagatttgtagctgagcatgacagtatgtatctgtagtcccagctatttgggaggctgtggctggatgacagcttgagcccagcagcttgaggctgcagtgagccatgattgcaccattgcactccagcctgggtgagagagagagaccctaactcaaaaaataaaataaaataaaataaaataaaataaaataaagatttgaagctaaagggaagaaaccattggagaagaaagccaaagatctgatggaggagaattcattatcatggtaatgttatgcatttgatttgcatatatctaagtattcccaccaacattttttttttttttttgagacagagtctcactctgtcacccaggctggagtgctggagtgcagtggcacgatcttggctcactgcaacctcctgggttcaagcgattctcctgcctcagcctccctagtagctgagactacaggctggtgccatcacgccctggtgatttttgtgtttttagtagagatgaagtttcgccatgttggccaggctggtctcggactcctgatctcaggtgatcctcccgcttcggcctctcaaagtgctgggattacaggcgtgagccaccacgcctggccccaaccaacatttcaagataatatatttctcctcccacttgggtttgacatattaatgtattttgaacttgaaggcttttgctgtgctatttggggcccctagtggtaaatctaataatgacatgcaatagaacagctaatataccagttattccttatgaaggttattctttctatgaggattaaatgaggttggaatatgtagttatagcaatagtagtgattcttaatcatttttttaaaaagagagtctcgccaggcacgttggctcacacctgtaatcccaacactttgggaggccaaggtgggtggatcacttgaggtcaggagtttgcgaccagcctggccaacatggtgacaccccatctctactaaaaaaactaaaattagctgggcgtggtggtagacggctgtaatctcagctactcggtaggttgagacaggagaattgcttgaacctgggagacaggaggttgtagtgagctgagatcgcgtcattgcactccagactgggtgacaagagcaaaactctgtctcaaaataaataaataaagggtctcactttgttactcagactgaagtgcagtggtgtgatcatggctcactgcaatgtccgcctctcaggctcaagtaatcctcccacctcagcctccctagtagctgggactataggtgttccaccactatgtccagctaattttaagaaattttttagtttttaaatttttttgtagagatggtggtcttactatgttgtccaagctggcctcaaactcctggtctcaagtgatcctcccacctcggcctcccaaagtgctgggattaccggtgtgagccaccatggctggccaaaaatgagtaatttttttttttttgagatggagtctcgctttgtcgcccaggctggagtgcagtggtgagatcttggctcactgcaacctcctcctcctgggttcaagcgcttctcttgcctcagactcccgagtaactgagactataggcatgggccatcacagccggctaatttttgtatttttagtagagatggggttttgccatcttggcctggctggtcttgaactcctgacctcaagtgatccacccccttggcctcccaaagtgctgtgattacaggcgtgaaccactgtgctctgccccaaaatgactaatttaaaggtgactgtaatatagttaaacaaatgcctcttttcccattctttactaacttgttatttaaatggggcaagtttttacaacataagaaacaggccaggcgcggtggctcacgcctgtaatcccagcactttgaaaggcagaggcgagtggatttcttgaggtcaggagtttgagaccagcctggccgacatggtgaaaccccgtctctactaaaagtacaaaaattagccgggcatggtggcacagactgtaatcccagctaatcagggggctgaagcaggagaattggttgaacctgggaggtggacgttgcagtgagcctagatggcaacactgcagtccagcctgggcaacagagcaagactccatctcaaatgaaacaaacatactaaaaacctattaacttgtttgatgtgagtgtgcttagctttatttcccttaaagagagtctttttttgagatggagtctcactctgttgcccaggctagagtgcagtggtgcaatctaggctcactgcaacctccgcctcctgggttcaagtgattcttctgcctcagccttcaagtggctgggactacaggcatgtgctaccacgcccagctaattttttgtttttagtatagacggcgtttcacgctgttaggcaggatggtctcgatctcctgacctcgtgatccacctgcctcggcctcccaaagagctgggattacaggtgtgagccactgcgcccggcctaaagagagtctttaggtgaaaaatttttgtgaatattgtgatttctccttaataatttcttgtgtatttatgaatttatataattaaatggcatatcaaaaaaatcacctatgttaattatgtttttgactcagttatattttcttttggtacattattaagttaatatccatatgcaaaaatatgctgacaatatattaattttggatttttcatttttatcagaaatcatgagtggaggatctcaagtccacattttttggggtgctccagttgctccactgaaaatgacagtatcagaagacacagcttctttaatgtctgttgctgacccctggaaaaaaattcagcttttatacagtcaacattctttatatctgaaggatgaaaaacagcacaaaaatcttgaaaactatgaagtcccagattctattggttctccagatctttgtggtcatttcttagcaaactgtatgaatagacatgttcatgtgaaagatgactttgtacgttctgtttctgaaacacagaatatagaatcccagaagattcactcctctagactgagtggcataactagctctaatatgcaaatatgtggatttaaaagcacagttccgcatttaaccgaagaagaaaagtatcaaagcttctcagtgaaaataaaattagagatgaacagcctaaacatcagccagatatatgtggtcagaactttaacacaaatttgtttcagttgggccataaatgtgcagctgtgttggatttggtttgtagtactgaaaaaattaatatagggcctgaagtggtacaaagagagtgtgtgccaacagaatatcatgaaatacaaaaccagcgtttgggattattttcctcgaactcagtagataagtcaaggtctgaagcagcagttaagaaggtctcagaccttaaaatatcaactgataaagaatttctcagtataattacctccagccaggttgctttttttagctcaaaagaaagataaaaggcggagtcctgtaaataaagggaatgtaaacatggagactgaaccaaaggcaagttacggggagataagaatacctgaagagaattcgattcagcttgatggttttacagaagcatatgaaagtggacaaaaccaagcatattcccttgaactttttagtcctgtttgtcctaaaacagaaaatagccgcattcacataaactctgataaaggtcttgaagaacatacaggatctcaagaacttttcagttctgaagatgaactgccaccaaatgagatacgtattgagttgtgtagctcaggaatactgtgttcccaactaaataccttccacaaaagtgctattaaaagaagctgtacctctgaagataaagtggcccagtctgaagctctatctagagtccttcaagtagctaagaaaatgaagttgatttctaatggaggagattctgctgtagaaatggatcggagaaatgtgtctgaatttaagagtattaaaaaaatcattaataaaaaactgtgattctaaaagccagaagtataattgtttagtcatggtgctatctccatgccatgtgaaggaaataaacataaaattcggaccaaattctggctctaaagtgcctttagcaacagttacagtaagtgatcaatcagaaactaagaagaaggtttttctgtggaggactgcagcattttgggcatttacagtgtttcttggagatataattttactcacgggtgaggtcattatggtatagtggtagcttattttataaagctaagttttgtttgtttttgttttctcccacttagtctttgaagactctttctttagtcatttgcctcttctgagctcagcataattgatccctttattgcatctgcattgctctcctttccattgtccactctcctgcccattgccacttctgggcctctgttctatccttctcagctctgccccttctttccacttatcccctcctttaataagccttccctagtcaggtggagtgggtcacacttgtaatcccagcactttgggaggctgaggcaggaagattgcttgaggccaggaatttgagaccagccttggcaacacagaacccgtctctacaaaaaataaattaagttttgcgtgcctgtagtcccagctacccaggaggctgacatgagaggattgcttgagcccaggaggttgaggctgcagtgagctttgattgggccactgcactctagcccaagcaacagagttagacctttctgcttctttacctaatgtctaataatgctgtgcacattgtgtttttactgtgggaacagttattgatttctgttgccttattttattatcaaaattatattaattacacttggaaatatggaaaggaaaaaactggtattataccaacttcatataaccaccaatagagttcgagagtgttgccttccagttattttctctgttctccttaaaatgtgtgtgcatgtgtgtatatatcacacatagaagctcatatttattgggagcttagtttgtgagaccctgttttagattttacatgcatatttcattacaacaagtatatgaggaaggtactgatttttatccccacttttcagttgaggaagctgaagcccagagaagtaaagtaacttgtccaatgtcatacatctaggaagtggcaaagctatagtttctcctagactccagaatttatactcttactatatagttgtaaccataaagaacattttgtttttttaatttttaatttatttatttttaagagacagagtcttgctatgttgccaagtgcagtgggtactcacgggcacaatcccattactgatcagcatgagaatttttgaattgttatttttaattttttgtttgtttgtttaataaggacaggatctcactgcattacccagtctgatctccaactcctgggctcaattgatcctcctgccgcagcctcccaaagtgctaggattacaggcgtgagctaccgtgcccatggtatttttaacatgcccttgtttccaacctggaccagttcacccctccttagggaacctgtggtcctccactcccaggaggtcactatattgatggcaagcttagtgcaaacacctgatcggctacaactctgaactcctgggctcaagtgagcctcctgcctcagtctcccaagtagccaggactacaggcacgcatgccgctgcacccagagagaatatttaatttttttttttttttgagacagtcttgctctgtcacccaggctggagcgcagtggcacaatcttgactcactgcaacctccgcctcctgggtgcaggtgattctcctgcctcagcctcttgagtagctgagattacaggtgcaagccaccatgcctggctaatttttgtatttttagtagagacggggtttcaccatgttggccgggctggtttcgaactcctgtcctcaggtgatccgcccacctcgccctcccaaaatgctaggattacaagtgtgagccaccgtgcctggccagaatatgttttcaccgaagacatctaacattgtgttacgtgttctttgttgatttaaaattgacacatggtgtattagagcaggaggaagttgattaagcttaataaaatatctaaagaaagaatgtgatacagaggcggtatttagaaaaagaaaacttcgaagcaatattgatagtcctaccaaatagtttacaggaggaatgagaaccttagctaatgtaccttggtgttcctgtaggattgtcaagtacaatctttttttttttttttgagacggagtctggctctggcacccaggctagagtgcagtggcgcgatgtctgctcactgcaagctctgcctcccgggttcacgccattttcctgcctcagcctcccgaatagctgggactacaggcgcctgccaccgcgcgcggctaatttttttgtatttttagtagagacagggtttcactgtgttagccaggatggtctcgatatcctcacctcgtgatccgcccgcctcggcctcccaaagtgctgggattacaggcgtgagccaccgcgcccggccgagtacaatcttttataaagaggtaaacacaaaattgtaatgaacaggcttagcatagccacatcccactggcaatattagctaatattatttatatgtgattatattattggaggttcaattcacctaactccctctgttctgattcagtgcttgctgaatacctctttgcttgtgatttggctttctagttgtagagctgcccacagcatgagaacaggctgaaatactgtttttttttgggcaattattgtaaatgaaaaaaaaatgttttttttctttaatttgtttcattaattgatttagtatgagcttatgttgcagagctgaaatctagttttggagtgttaacaaaattaagtttcccagactgtaaaagagggctggatcctggaccatggtcattttaccgaggcaattaatgtcagcagggacctctcaggggccttttccgttttcctaggtaggtgtaaactcaactctgcaatctctgtattttttcctaacatctctatagttgttaacgactaggtaacattctctctggtggctgtaatgcaatttacttaaccattttcctattataagacatttagatgatttctatgaactttttttaaaaaatcagattttttttgtctttttaagaaaaagaggatctagttcaccgaattctgaataagtttcttttgtgtggaacagatggaaatgttgggaaaaaaaagaaatctacacttttctgttgtcctaatgagtcagtgaacttagttggatagcttgggtagttcatactacctattgatatatacccccaaacagaaatcttcctttttttttttttttttttttgagatggagtcttgctctgttgcccaggctggagtgcagtggcgtgatctctgctcactgcaacctctgcctcctgggttcaagtgattctcctgcctcggcctcccaagtagctgggactacaggagcccgccaccacgcctgactaatttttgtatttttagtagaggcagggtttcaccatattggccgggctggtctcgaactcctgaccttgtgatctgcccaccttggcctcccaaagttctgggattacaggcgcgagccaccgcgcccggcccatactgaaaaatttgaagtaacagatgtattccagaccttgttgaataccaacacagtagacagtttgctattataacttctagcaatagaatgaagagatgccaaaaataaggattacctaagggagactactgactagaattagaagaagatgggaggcttaacattgggaaaccacagtgtttaaaggacaaacagaataaggactaggagctggggcatgtcagtgagagggtaggaaggagccaggaggccagggcgggctacccatcccctccatgcaccactagtgattactatgtcactaatccaacataggcttcacagtcctagctttcagaatgctctccttgaaatttcttgtctgttccttttttctgaagaacatgcatcctgaatgttggatcatgaaaagtcttgaatgctgtactagctcttcctggctaggcagtggggaaccactgttttttagtaagtcacctgaactcattaatgctctgatatatcactcgcctgaactcattaatgctctgattaatgactcattagcattgtaagaaatgggttgcaggcgggacaagcacctgttgggagggaaaggaatgtgtaatgtaaaacagtagtagtggtggggcatgggcacatttaagcagcagaggggtaggtgggagctggtggcaaggagtgggaagggagaggcaagatgacttcagattttagtttacttgattagcagcatagcatcaacaaatgagttgggcgctatgaaaggaaaagcagatttggacattgctgagtttggggagccaatggaatatccaggtgggaatttccattaggcagttgtagataaaaggttcaaaagctgaggaaagggtctggaatctaaatctgtaagtaatcacttggaatttatacatccttggttttctttcctattatctctaaattatttcactattgttaatatacgtttatacctctgacactgtatgctgattagatcctgccttagagatagctcccttcccctctttctctttacagctcacacgttttgctctacctacaattgtttctacctgttggtatgtttagttctacctgattctactctatccgccttagatatacagctctctctttccagttggaaaatgttccctacctccaaagtctttcacttttaacttgtgtggaagataattatcgtgctatttagggaaaaataatcaagtatgttaagaatgccttatattcagatatatttatagtagaagggaccagtgcatactgaatattattactctcctaggcactacggctttggaaccactactttgccttctggtcctaaaaaaaattatttttgatgtatcagaaatatacatgataacattttccttatgtaaataaaagctattaaaccttttttatatagagcagtggacttccatactgctatcatttgaatataaagaagcaattttgttaatttacctagatttagattttagatttgctgttttgtcatttcgtgcccttaggcaggttatttaacctatttgatctctagttgcttggtatatgggaggcatgcataatattttgctgtgactagtaggttaaccacattgtgaaggaatttatggcatgatcagaatgtttttttctctctctagatgttgttattcatgaggaccaatggattggtgagacagtactacaatcaacatttagcagtcagttattaaatcttgggagttattcatctattcagcctgaagaatgtaaggcacattttaaatgaagtaatgtattagtgtttaaagtataaaaacatactaggaaagattagagttaaaatggttcttttacaaaatgttttctaaacagttggagagtattggtttcttttcattagtaagaatgaaaatagaattttaagaaatgaacttgtacattgtaaatcacatttattttaagaagtattgggtatcatgtttcgttttcttaggctgtcagtatagtggtggttcttcaccttttagggagtcagagacctctttgagaatctatagaccatttctccagaaaactggacttatgtagataggcacaaaattttgcttataattctaaagcattccgtggacctctgaagttcttctgtggaacttctgagcctctgattaagaatccttgaggtaataaaaatgtattggtctcgtattcagacagctgtggtttgaatccttattctcctgtctaccactgctaagaaaagctatctttcttctttaatgtccagttttctcttctttaaaagaagctgtttaatgaggaaactagcagctatctcctccactaggaaataaaatgacataaaaaaaagaaagaaaacaaagtaagggaaacagtataaacttgtggttttggtcactggactcagatagaccaggatttgaatcctggccctcttacttccagtctttgtctttaggcaagttatttcacttcactatacctttatctccttttctgtgaaatggagataaaaatacatatataccttatagggttgttatgaagattaagtgagaaaatgaatataagatgttgaacctgcacataatgtagtagtaacatagtaatattagagggagaaataataagctagcaaaatatatttgataaaatgctgaagtatcatacaagaaaatagctagagaaatatactgattatacaagaagataactggaataataggaaagttataggatgtatatggaagatagagcatggaattccaatctttgaattcttaaagaaaggcagagcaagtagaagggaagagcaacaattagaataacaagaactgtgtttgggatgggcaaggtttcattatatactagggtggcccatcagcagaaaaccaactctgacatatttcatagacaactcaaatagagttcttcatctatccaatatatatttattatgtgttgacattgtttcaggcactgtgtttactgtacactgggggtacaatggtgcctgtcctcctggagcttatgttctcatgtggaagacagaccaaaaaaaatgaatgaaacagacatataagtaaaatatttgcaggtgataatgagtgctatgaaggaaactaacaaagggttaagatacagaatgccatggttctagttgagaaggattgatcatggagtagaatcagggttaggaagttgttacaatagctgcagttgagagataatgggaggccagtggagctaaagagccgagatatatttgtaaatagagttaataggattttctgatgatgtgggtctggggatcagggaagagggacaatctactgctactggattactggtttaagtaactaggtagcctttattgtgaaagactgagagggaactggtttgtggggaaaagggctatgtttcaaggcatgttaagttttagatatctttgagatattcaagtggagatgtcatataagaactggaaacaaagttcaggactcagaagacaggtttaaaattaagaggcaaattttagagttattagcatacagataatatttcaaatttaaaagtttttaaaataaatattatctgtataattatagaatcacaggggattgcaaaaataatacataaagtcccatgaactcttcttctagcttctcccaatggtgatatcttatataactttagtacaatatcaacaacaggaaatcaacatttgtataatactgttaactagtaatatactaggatactttccctttcagtatcaataaatatagtatcagcctggcacagtggcttatgcctgtaatcccagcactctgggtggctgaggcaggaggattacttgggcccaggagctcgacaccagcctggatgatatggtgaaacctcatctctactaaaaatatggaaaaattagccaggtgtagtggtgcacacctgtagttacagctactggggaggcttaagtgggaaagaaagttgaggctgcagtgagccatgattgtaccacagcacttctgcctgggtgaccagagtcagaccttgtctcaaaaaaaatttttttcttaaataaataaatatagcatcaatacagcattataatatgattaatactatatcaataaaatagatacttagtcctaatgccaatgtcttatttaatagaaaagcactcgaggcattgtcattaaaaccaggaaaaagataaggatgtccactatctctgcaactattcatcttatactagaattatcagctaacgcacttagacaagaagaggcatctggtctggtgcggtggctcacgcctgtaatcccagcactttgagaggccaaggtgggcggatctcttgaggccaggagtttgggaccagcctggccaacatagcaaaaccctgtctgtactaaaaagatgaaaaattagccaggtgtggtggtgcatgcctgtggtcccagctactcaggaggctgaggcatgagaattgcctgaacctaggaggtggaggttgcagtgagcacctgtacactgcactgcagcctgagggacagagcgagattctgtctccaaaaaaaaaaaaaaaaaaaaaaagaaagaagaggcatttgaacatttgaatggataaagaagaatgaaaattatctctatttacaaatgctctgataacatacctgaaaactccagggaatcaaagttaaaacaaatttaaataataagataattcaatgatataacaggatgcaaaattaatgttaaaaaatatcattaggctgagtgcagtggtttgcgtctgtaattctagccctttgggagatgaaagtgggtggacagcttgagcccaggaattcaagaccagcctgggctacaaaaaagaaaaaggaaaagaaaaagaaaaagaaaaaaatgctgggtgtggtggcacacacctgtggtcccagctgtttgggaggctgaggtaaaaggattgcttgagcccaggctgggggatgaggttgcagtgagctgtgattgcaccactgtactccagcctgggcaacagagcaaggccctgtctcaaaaaaaaataataataatagtaattagacaatatacacaaataacaaacagagggcataatgatagtgaaaaactcatttactatagtaataaagaagatagttcaaaatacagttaacaagaaatatgcaaagcctatatgaggaaaaaatttaaacactccagaaagaaatgaagacatgaataaatggaaagacatttcctgttcttggataggatgactcaacattataatgatgtcagttcttcctaagttaatatgtaaattcaatgtagttccaatgaaaatatatgtgttgtggcatataaaagttgatactaaagctcatatgggaaaacagacatgcaagaatagctaggaaaagactgacaaaggaaaactacagaggaggggaactagctttaccagatgttaaaacatactataaagcctctgtaattaaaacagtgaagtactgatgcatgaatagacaagtagaccagtggaatagagtaagaagattagaattagacccacctacatatagcaatttaatatatgacaaagatagtatctggaatcagtgagataaaagctaacttcttaataaatggtgctgagacaactgggtagccatttggaaaaaagggaaaattggacacgtatctcacaacaaacagtaataaacaccatatggattaatagtctaaatgtaaaaaataaaatcatgcaacaacaagaaggaaacctgaatgaatcctctgtaatcttggtgtagggaaaggctttttcttaatattactcagaatccaggggcagtagaagataaactgatacattttactgtagaaaaataaattttgcataaccaaaacactataaacaaagtcaaaagacaactgacaaacttggagaaaatatttgtaacatacaacaaaaggctaatatccctaatatataaagaacttttaaaccttgagtgacaaagtctgggtgtggttgttcacactggtaatcatagcattttggaaagctgaggtgggagaatcacttgagctcaggagtttgagtccagcctgggcaacatagtgagaccctgtctctacaaaaagtcaaaaaattagccaggtgtggtggtgcatgcctatggtcccagctacataggaggctgaggcaggaggattgtttgagcccaggaggtcgaggctgcagtgagctgtattcatgccactgcactctagcctggcaaaagggaaaatgtgaaaaagagatgaacagtcaattttcaaaaaaagatataaaaatggctatcaaatataacttattagagaaattcaaattaaaactacatggagataccatttctcacctatcagattggcaaaattaaaaaaaaaaaaagcacattctgttggcgcaactgtgaggtaatgtgccctcttatacattggtggtaggaatgcaaattgctacaacccttttgaagggatatttggcaatatctaacaaaattacatatgtacttagctttcaacctagcaatcccacttctaggaatctaccctgaagctacatctccaacaatatgaaaatacatatcacaaggttattcattgcagtattgtttataattgcaaaatatataggagaatgattcactaagttatggtacattcacatagtggaacactatgtactatgcagctgtacaaaaagaatgaaaaagatctctacgaactgatatggagtgattcccaggacatactgttatgtgaaaacataaaccccccaaaactgtatgtagtatgctgtccttcctgtaagaaggattggaggaataagaaaatacctctgtttatttgtggaaagaaaatgcaggaaggataaaccagaaactaaagagattggtcacctacagggggcacgtaggagaggggtggaagaaagtggggaatgggaacaggatagcaggggtcaggaggaagtgacactaacaaatgaatgtattattgttacaaatgaacccaatattgttacaaatgaataaaataactacacagaagggggtggggaagaaaagaacaaacctaagtagctgtggaaaagagtatattgactggattctataaggctaatgacagaaaggactgtacataaatgctgcaatctagttagaaatatgtttctcaaaggggaatggcttagcaataaccttatgtacatactagaatgaacaaatgagtacatagattgtagataaggaaagctggatttctcactgttggagaaagaaattataaacaagggaaggttaaaacgaaccagaggtattgttataaactgaggatttttaatatagataaatggatacagaaatataggcatgtgtatatgggtgggatagtacacatacataaacatctcctagttctgtccattgagcgagcacagcacagatgcagttactccccagtaataatgagcatacctggtgcccagatcttcgtctgtaaacattttcttttcttttctttttttttttttttgagatggactcttgttctgtcacccagtctggagtgcagtggcgtgatcttggctcactgcaacctctgcctcctgggttctagcaattctcctgcttcagcctcccaagtagctgggactacaggtacgtgccaccacgcccagataatttttgtatttttagtagagatggggtttcaccatgttggccaggctggtcttgaactcctgacctcaaatgatctgcccactttggcctcccaaagtgctgagattgcacgtgtgagccaccgtgcccggcctctctttttttgagacagggtctggctctgttgcccaggctagagtacagtggtgcgatctcggcttactccaacttccgcctcctgggctcaagccagcctcccacttcagccttccaagtagccggcaccataggtgtgcactaccacgcctggctaatttttgtatttcttgtagagactggatttcaccatgttgctctggctggtctcggactcctgggcttcagcagtccacccatcttggcctcccaaaatgctgggattacaggtgtgagccattgtgcctggccaacatagttctctaatgaaaggaaccagctctgctaaaagtggttgattacaggactgggtcagggcaaattcaggataagcctggaagtctagtggtgccagacaagacatgttgaaataatgcaagagccaacctgaaggaacacctactggctaaagctgaagcaatttgagtaagaaaataatgatagtattggattagaacccatagattaaaatctttacaaatccttactgatataaagacatatttatttcattaactaaccagaggggaagagagagctcttccttccaatggaattccaattaataaatctgagagaaaagaaaaaaaaatagagaattactggccatgctcagtggttcatgcctataatcccagcactttgggaggctgaggcaggtgggtggcttgagcccaggagttcgagaccagcctgggcaacatggcaaaaccctgtctctacaaaaaatagaaaaattaaccaggtttggaggtgtgcccctatggtcccagctattcgggaggctgaggtgggaggattgattgatcccaggaggttgaggctgcagtgagccgtgatcatgccactgcacttcagcctgggcaacagagtgagactctgtctcaagaaaaaaaaaaaaatacaaaacacaaaaatagagaattaccatcaggcagagatcacaataataaatactgcaccgacacaaatgcactgatagatgctaaaattagtaggtgaaagtctgaggagagagagcattgcatagtctcaaagtatctccccaggataccagcttactagagggaaaataataaatttataagaaaactcttcagacaccaagttaactgagtgattggggtaaatatcaccagtaataagatgtatggtatcataaattctttgatattatccattgagaaggatccaccatattttttgtggaattgccaaaaatgcataacttcattccaatcataaaacactggagaaacccaaagggaaggacgttctactaaataaatgatcaggattcttcataagtgtcaaggtaatgaaaaagaaaagactgagaaactcttatagactagaggagaccaaagagaaataacaactaaatgtgaggtgggatcttggatgaaatcctacatagaaaaagcatattaataggagaattggtaaaatttaaataacatatacattttaattaacaatatttaattaacgttagtttcctgtttaagataatttataatatgtgagatgcccacattagtcgacatagtgaggaatataagggaactctgtactatttttgcaacttttttgtaagtcttacattagttcaaaacagagtttttaaaagagctgtatacgatcatctcaataggtacaaagaaagcttttgataaaattcaacacctgttcattaggaatagaataaaattttccttaacttcataaagagtgtctttagaaaacccagaacaattatcatcctaattggaaaaatattagaagcattccttttaaaattcaggaatatgactaggatactactattactacttttcttcaacaccatattagagttattaaccagtgcaataaacatggaaaaatagatatgtaaagattggaaaggtagaaataaaactgccattattatagatggtttacataccttttccctctgaaaactacaaacaaattatcagaaataatgtgaaaatttagcaaagtagctggatataagattaacatacaaaagtcaatcacatttctagagtagagcgactaacaataacaaaggaagctgtcattgacaacaatattattttgtactaatagtaataaatgtaacaaagtatgtgcaagacctaaaaaaggaaaaatttttaaatgaagaaaaactaacaaagaatgaaataaacatactttattcattaattggaagatttaacattgtgaagatttcagttcttttcaagttgatttgtaaattcagtgcatgttccataaaaatcctcgtaagatttcaagggcgcagtggctcatgcctgtaatgccagcactttgggaggccaaggtaggaggatctcttgaggcaaagagttaaagaccaataagattttcatgtaatttgataagattatatgatatttatgtagaagagtaagtggttgaaaacagcagggcattttaagaagaaaagcagggaagaataatttaccctatcagctatcaagacttagtatgaacctatagtaactgagatggtgtggttttgcccagttgaagtcagttaaattttaattttgagatttctgtaaaagatacaagtttagtcttttattatgtatatttgaaggtgttacattttggaaagtgtgtgtgtatgaatgatagctaaatggcttctaagtaaaattcagcatatcttgtagatgttgatagaatagaaggggaaggaatgttttgaaataatgaaaataacatggtatgcaaatgctttgcaagagatttgggaaatgtagatatctctggttttaaggatgatctagattcaagtaatagttcagtaatttcataaaactcttatgacaaaattctggatggagaatattctatgaatcccctagagagtttcaggtttttgtagaatgatgtgaaaaatcttgaactaattagataatctttagaagttacttcacaatctttgtttttacacatacacaggaatttatggtgctttattttttacaagttagtagctaaataaagtatattctaaagttttttattgatgtagggaaatggctaccagtggacattttgagaatattgcagttgttttccttctgaaagagtaaaccgggtcatgacgcagcgagtttcagtcgtgacttttctgggggcatcgcggcgtcccctttttttgcctttaaagtaaaacgtcgccccgacgcaccccccgcgtatttcggggggcggaggcggcgggccacggcgcgaagaggggcggtgctgacgccggccggtcacgtgggcgtgttgtggggggggaggggcgccgccgcgcggtcggttccgggcggttgggagcgcgcgagctagcgagcgagaggcagccgcgcccgccgccgcccctgctctgtatgccgctctctcccggcgcggccgccgccgatcacagcagcaggagccgccgccgccgcggttgatgtggttgggccggggctgaggaggccgccaagatgccgcagtcaaagtcccggaagatcgcgatcctgggctaccggtctgtggggaaatcctcattgacgattcaatttgttgaaggccaatttgtggactcctacgatccaaccatagaaaacacttttacaaagttgatcacagtaaatggacaagaatatcatctttaacttgtagacacagccgggcaagatgaatattctatctttcctcagacatactccatagatattaatggctatattcttgtgtattctgttacatcaatcaaaagttttgaagtgattaaagttatccatggcaaattgttggatatggtggggaaagtacaaatacctattatgttggttggaaataagaaagacctgcatatggaaagggtgatcagttatgaagaagggaaagctttggcagaatcttggaatgcagcttttttggaatcttctgctaaagaaaatcagactgctgttgatgtttttcgaaggatgattttggaggcagaaaaaatggacgggggcagcttcacaaggcaagtcttcatgctcggtgatgtgattctgctgcaaagcccgaggacactgggaatatattctagctgaagaagcaaactgcccgttctccttgaagataaactatgcttcttttttcttctgttaacctgaaagatatcatttgggtcagagctcccctcccttcagattatgttaactctgagtctgtccaaatgagttcacttccattttcaaattttaagcaatcatattttcaatttatatattgtgtttcttaatattatgaccaagaattttatcggcattaatttttcagtgtagtttgttgtttaaaataatgtaatcatcaaaatgatgcatattgttacactactattaactaggcttcaatatatcagtgtttatttcattgtgttaaatgtatacttgtaaataaaatagctgcaaacctcaaaaaaacaaaaaaaaacaaaaaaaagagtaaaccaatttggttactcattttaccaatttggttttgattttgcaagtggttacaactcatgagaggattcttatttctgatcaatatattgtgtttttggaaaggacttctgggaaataattatgatgaagccctcgagcaattgcaacaaaaccaaaaattgaaaagtgggacctaataatacttttttaaaatttattttttagagacaggatctcactctgttacccaggctggagtgcagtggcctgatcatagctcactgcagcctcaatctcccaggctcaagagattcttctacctcagcctcctgaatagctgggactacaggtgcatgcccccatgcccagctaatttttgtattttttgtagagaccaggttttgtcatgttgcccaagctggccttgaattcctgagctcaagcgatcctcttgtcttagcctcccaaagtgctggaattacatgtgtgagccaccactcccagccccagaacaactattattaaaaagtcaaaaaacgacagatgttggtaggctgtgtagaaaaggaaatgctcgtacactgttggtgggaatgtaaattagttcagccgctgttgaaaacagtttggggttttctcaaagaagttaaaactgaactatgatttgacccagcaatcccattactaggtatatatccaaaagaaaacaaattgttctaccaaaaagacataagcacttgaatattcattgtagcactattcacagtagcaaagtcatgcaatcaacctaggtggccatcagtggaggattgaataaagaaaatgtggtacatatacaccatggaattctacacagccataaaaaggaatgaaatcaggatggtgcggtggctcatgcctgtaattcccacactttgacaggctgaggcaggcagattgcttgagtccaggagtttgagaccagcctgggcaaggtggcaaaaccctgtctctacaaaaaatacaaaaaaattagctaggtgtggtggtgcacacctgtggccccagctatttgggaggctgaagtgggaggatcacctgagcccaggaggtggagtttacagtgagctgagattgtgccactgcattccagcctgggcaacagagtgacaccttgtctcaaaaaaataaataaataaataaataaattgcagcaacacagatgcagttggaagcaattatcctaagtgaattgagggaggaacaggaaaccaaataacgtgtattctcacttataagtgggagctaaacactggctactcatggacatagaggtgacaacaatacacactggggactactagagggagagggttgaaaaactacctgttgggtactgtgctcagtacctgggtgacaggatcacttgtaccccaaagttcagtatcacgcagtattcccaggtaacagacctgcacatgtacacccgaatctaaagtaaaagttgaaaagaaaagacttctgttctttcatctttatagtgaggtgttacatgttttacaaacctagttctgataatgtgacaggaatataaatttatcttgaatattattaaatatataagtcaaagatcaacacagtgtttccatgaggtagactttttttggaatctaaataaccatgtgtttccatgtaaatttttatgaatcagggacaaatatataatttgatgtcagagatgtttttgttccccaaaagctctatcttgttcatgaaaaacgaagcccagagaagttatgtacaagttcacagagctcattattgacaaaaccagaatttgaatacaactcttctgattccagatttgctggaaatactgtgaaagaagaattcagtctggtagtattacgtgtggttttaattttttctttgtaactttagtttgaattttatgtgtgtgtgagcatctgcatttacttttaaaaacttttattgtaaaagccttcaaacatatacaaaagtagagaatacaaagcataatgaacttaagtacctattagccagcttattaaaacatggtcagtcttgtttcacctgttacatcccttttcttttactgtctaaaggaaggaaagaagaatcacaaatcagtttatgaagtctgctttctaaaaagtacttaagtgtttattgccaatatcttattttggtcagcaatcaatcacgtactcaagcatacttctcttaccttcagagaaattaaaatttaatcagcaaaactcatcagcctgtacatttaaaatatatgcatgttattgtacagaaactataccttaataaaaagtgagaaaaaaaaatgagacaggaaagagaaaaacatttaaaagacatagtaactgaagaattaaataaccaatccaacacttgaaaaatattacaatgtagcacatgcttaaaagctctctgagctcagggaaaaaagcagcactgtgaatctatagtggtcatcattctatgtggtattgggtaggacaagaagacagccttgcagctggaaattggtgaggacggaggcctcgtgtggaaagagtaaggcacactcagggagagaaccagtgaggtggctctgagcctgtttcagaaggggcttgaggaagaacggcagaggctaggatagttgggaaagcaggatcaaatcagactccagggattggggaaccaattggctgttacagggtggtggagtcaaaaaagaacagaaattttgtgtttggttaattgatagaaaatgatattattaacaaagtaaagaagtatgggaacagcacaagttttttggggatagtaaataattccatttccattgattaaaaatatcaagtttatttttacatctaaactgattcaagacttagctattgtacatgttttagagaaaacaaaactatattttatatctaatcatactttacaacataaaatacagttctaaaaaatattatttgtcaagaaaaatgtaatgttgccatcttttgtctgtatgcatgttttttttccttagattccagtgtagttagtgacgttgtacttcaagacttactggcatatgtgtcctcaaaacattcctacctcagagatcttcctccgagacagcctcagagggtgaacagtatagactttgtagaattggagcaccttcaacctgatgtgttagtccacgcagtactaagagttgttgatttcctatactgacaggtaaacattttgactgcctccttaattttagattatgaaaaaattaagatacaagaccatcttagtgtaccatttggttatcactatatatgtatcatcagctattaaagtatggtatcacgtgtgatagagtaatgccaactaagatactcattttccttttccagaggcagtatacagttatagaggacagaagcagaaaaaagttatgttaacagtggaacaggcccaagatcaacattatgcgcttgtattatggggtcctggagcagcctggtaccctcaacttcaaaggaaaaaaggtaaatacaccaaaaagcatttaacctatttatatttcggtaaatgattaatgtttatgagcccaagatggagaaaatcttaagagacgagacagcatttgaaatacaagtgatcatgattgaatattcttctgcaaatttcttctgttaaaattttgtacctcttgtagcaattcatttatctaataagtcttcattaattaatggtggtgaaataaaggcttaaatttattcccagatatactactttacctttttagtgaagatcttacctccttcaaataatgttctttaaacatttaattctggagaagcttctacaatttttttttcagccagagtactctgataaataaatgctatgattataaggcagatgtcaagggagttaccttaactctttcaagtcacaattaatgttcaataaattacagtttcatatttttattatagttgttttaaaagcatgcactgttagccatccctagaatgttcagtgttaaaatatgacccatgattacatttttctttaaagcataaattatttctggtatattgaattaaatggaattgatgtttcattaaaatagtatagtgtcttccctttgctcttgtgagatcctttagttgtaacaatcaaagacagtttcatttgtggcttatgagttatttttccctgctaaattaatttagagattgattcagtatattattattttttacctgaaagagttaatgtctctccaaacttctgccttccaaatagttatttgtagataggatctatcacattgtctctcttaatcattaatagctatgactaggatttgagataagtctaactttggacttttatgttaagatcaaacagggacagatgtttggttgagcaagctgacaaacatgtatcagtgatagactaactatgatcattgaccaccatagcctggctgagaacatgagtctagtgcatgctacacaagaatgtaggtcacaggtatagtggagctgtaacagagcagattgctccatgtttaatgtgaatattcttttaaaattaatagttttttggttaatagaagagaaattacagttgtctctaggtgactctatggtgtttaggttagtattgaaaacgtatgaatccaggaattaagatgttgttgttctttgtacattcattcatccagccccccttatttgtaaccatcattttaaagttttaacatctacttcaatacctcacatcagtctttttaagataaaaataccaattttgaaggattacttaagtaattctattttcctgattttacttttcttttcaagagaccaaccccatttccaaattcccagcaaagagaatctgattgcccagagtaaatttgattcaaaaaactgtgatcaggaagacagggtcacgcaatacaaatatgagagcttgagcttatttcagtggatgggaaaacagttaagggaatcatttgtgatctgggtgaatacataaagatattcactaccaaaaatgtgtatgttcattagcttagaaagatatatgtaatgtattatttagtttaaaaagtagattataggccaggtgtggtggctcactcctgttaacccagtaccttgggaggctgaggtgggtggattgcttgagcccaggagtccaagttctcatcttaaaaaaaaataaaaaataaaaaaaattggattgtaaaacttcatgtatagaaaatatattatgttatcatataataaatatttttatgtttatataagttaatacacaaaaattttcaagaaaaccctttatatatgatagtatctcattttaataaaaatgtatctataagtacatatgtgcatttgaaaacctggaaatatgcatgtatagcaaaatgctagccgtagttatttctgtatagtagtattatatgtgctttaatttttttctttatacctttagtttgaatttcatatgtgtgtgagcatctgcatttacttttaaaaacttttattataaaagccttcaagcatatacaaaagtagagagaatactaagcataaggcactttttttttttgtttgtttgagacagagtttcattcttgtcacccaggctggaatgtagtggcatgatctctgctcactgcaacctccacctcctgggttcaagttattctcctgcctcagcctcccaagtaactggaattacaggcatgtgccatcatgcccagcttatttttgtatttttagtagagacgaggtttcaccatgttggccaggctggtctcgaactcctgatctcaggtgattcacccgcctcagcctcccaaagtgctgggattataggcatgagccagccaccgcacccggccagcataatgaacttcggtacctattagccagcttattaaaacatggtcagtcttgtttcacctgttacctccctcatctttactgtttaaatatttcacaataaatgtattttattttataattaaaaataaaattaaaaccttatgctttttaaaataaaagaatagttaatgtttggaaaatctagctaacaatgtgagaaaaaatagaattaaatttatactttatatttgtgccaatataaatttcagatacattagagattcaaatacaaaaataatgaaacaatgaatagtagaagaaaatataggcaaaattatttgtaatgcaaaggttggtagggtaaataaaatccaggaacaaaaactattatacataaaaaccaccatgtacaaaattgaaaggcaacaaaaaaaaaacagaaaaaaaattacattgtcagacaataatgcagtaagcaaaagacacatatctatagagttaaatggggaaaggatatgagtaggcaagtccccaaagaagaaataaaaatggccaataaatatatggaaaaattgttcttacaagtaattgaaaacacacaaagtaatgatgatagattatttttcttttaagaaattgattgagaagatatgggaaaacagctactgtcatcagctattggaaatgcaaactggcagaacctttcttgaggataactgacaattaatatgaacaaattgggggtacttttagcccaataattttagctctaggaacttatcataactatgtataaagatgtagctgaaaatgggtttatcatggtatcatgtataattgtgaaaaataaaaaacaaccagagtccctcaaaatagaggtttgctgtaataatttttaagattttggtgtatctggacaatggcatattatgtaatatttaaaagcaatgtagaataatacatacatataaaactatatttgacttattaagtcaatcccaataaataaaatcccaaacaactggttgtccgctaaaatgttaactgcttatttagggtgttgagattatggctgctatatgtttatttacttggcttctcttagcttacttttctaatcaggtattttgtaataagacaagaaagctattttagtgattggttttaagcagtaacttggaatatatgctttagttctagctagtgatgttctgtctttacagatttactgagatgtttgatgattttccaccaaaaaaaaaaaaaaatctttagtgaaagaaactaaggagatgagcaggtgtagtaaattagatttatggcctgaagtgagaaactaaaaagacagctgatgttatcagaaaaatgagtgctaagaaaccctcttttgttttattatagttttgaagttgaatttactaatacagaatatgataatacagataagttgaatttactaatagagaatataacagtaacaaggtctgtgttactgtggctttaagtattagaattgtggccggcgcggtggctcccgcctgtaatcccagcactttgggaagccgaggcgggcggatcacgaggtcaggagatggagaccatcctggctaacacagtgaaaccccgtctctactaaaaatgcaaaaaaaattagccgggcgtggtggcaggcgcctgtagtcccagctactccggaggctgaggcaggagaatggcttgaacccgggacgtggagcttgcagtgagccgagattgcgccactgtgctccagcctgggcaacagagcgagactccgtctcaaaaaaaaaaaaaaattgttactgagagttaaaaataagtactattgtgtctaaatgctttttgttctagaaaagttaactaagataactaaagtattgaaatatgagtgaaatattagacttgggttcatttcagtgtcctttctttaacaaaacaaaacaaaactttgcctatagatagatacatgagaattttctttacagaaagcagttggttattataaatgatgaccgttcaggagggcaaggaatctttagaaaatattttattaaaattatctctggtggcccggcgcggaggcttatgcctgtaatcccagcactgtgggaggccgaggtgggcggatcatgaggtcaggagttcaagaccagcctgaccaacatggcgaaaccctgtctctactaaaaatacaaaaattagccgggagtggtggcacgcacctgtaatcccagctactcaggaggccgaggcaggagaatcacttgaacctgggaggtggaggtttcagtgagccgagatcacaccactgctctccagcctgggcaacagagcgagactctgtcttggaaaaaaaaaataataataataatctctagcatgcttctgttgtcttaatgcaccattcatattttgtctctgtttacccaaattctttagtgataaaagattagtattcaactgacttaatcagatcaatctatttaatctgatactaagcctagattttttttcctttttggtgacttttgtttttactgtttttgtttaaggttatatttgggaatttaaatatctttttgttcagcgcaattacacactagaaaacctagaattgcatacaacgccttggtcatcctgtgagtgcttgtttgatgatgatataagggcaattacatttaaagcaaaatttcaaaaaagtgcaccctcctttgtgaagatatcagacttagcaacccacctagaggataagtgttcaggtaagatttttatatacataaattctgctatttttatttcttttgaaacagagtcttgctctgttgctcaggctggaatacagtggtgtgaacacagctcactgcagtctccacctctcaggtttaagtgattctccccgctcagcctttcgcgtagctgaggagggaagggaaggctagtgcataccatcagtgcatgccaccacacccagctatttatttatttattattttggcagagacagagtctccctatgttgcccagtctggtctcaaactcctggactcaagtgatcctcttgccttggactcccaaagtgctggaattacaggcatgagccaccacacccagcccactgctagttttaatataagcaaaaaggctaccacttgtggtaaaaatgtataagtctatataaaagtgaaatataaatctttgcaaatatctgaactagattccagtagttttaggaactatgtgctaggaaccagggacaaagagcaaatacctattttttattatatgacaagtgggagcagaaattcagatccttactttatcttggccaaatgccagattaaaatgttactagttgggttaattcacatatatgtgtaaatatgttttccaatatatgattgaagggttagcattgttatatcataaaactatgctaaggagaatacaggcagaaaacaaagacaatacctctcaaaaaacccaacttttaattgaatacagagatttcattctcagagaagaactccttattcttagttctacactgaaacatttactaataccagcagatagtttaaattaataatatttctggaaggtaaacacagatgatagaaaatttataagcttttatactataaaaatttcatactattttcaaaaatggaagttgcctatggtcataaaagactctagatttatactaactggtaaaatcttggtaatgttatagcatcatgtaagttcctaagccagttttatatttatgtgcccctcccgtgctctgcttctccaacttcacagacatatagaggtggtcaccacaggaaggaatgccagacacagttgaggggctaccttactttgcagagacgtttagtttggtgccatggagaagtcaactctgttatttactgcttacacaaaacagttatctgctgggattgaagtctagaattaggtttaaaaataaaaataaataacatcatggacaacaacaaaataggaggccaccacgctgatgatgaaagattctcaggctatagccccacttgtttgaggacgcagccaggaattgtgcatgttcttggaagtcctggaggtgtgctcctcattagcaagccatgccaaaactgtgccattaaaatcagtccttcagaggctttgttcacagaggcctgtttagcctttttcattctctttatgttcagctatgagggctgaattcatagtttctgtcatagtgtatgtgtttttaagacaaaaatggagagagaatatgaaaacacaagcaacttttccctaacctattttatagttaaataaaaggagaaagagagatcagcatgggagcatttcctagaagggtctgcttgctcaacaaaagccagagggggatgaggctaggcctgagtccttgtaaagaaatgaagacgcttacccagtacctcatcttaccgccagcagaatttcagtgctcagcggagtgacccccttgaaagcaaagtccacattcagcgtgaccttttaattcttttcaagagttgtgtaaatttacaaaatgataggattatgtgaacattcttttaaaattattgaattattacgaattttttaggctgggcagggtggctcatgcctataattccagcactttgggaggccgaggtgggtggatcatttgaggtcaggagtttgagaccagcctggccaacgtggtgaaaccctgcctctactaaaaatacaaaaattagccaggcatgatgtcgggtgcctgtagtcccagctacttgggaggctgaggcaggaaaattgcttgaacgcaggaggcagaggttgcagtgagccgagattgcaccactgcagtgcagactgggtgacagagcaatactctgtctcaaaaaaaaaaaaaaaaaaaaaaagactttttgagtggagggaggagagcaagggttgaaaaactaactgttgggtactctgcctactacaggagactacttgggtgatgatatgcccatgtaacaaacctgcacatctaccctctgaatctaaaataaaaatcgaaatttttttttttacatatttttttaggccagacacattggctcaagcctgtaatcccagcattctgggaggccaagaagagtggatcacttgagcccaggagttggagaccagcctggtcaacatggcaaatccccatctccacaaaaaaatacaaaaattagccaggtgtggtggtgtgtgcctgtagtcccagctactcaggaagctgaggtgggaggatcacttgtgcccagggaggttgagactgcagtgagtcaagattgcaccactgcactctagcctggacgacagagtgagactgtctcaaaacaacaaaaaataataattttgtagtgatttaacatgtctttggaaagatgtggtattgaatcttctacagtttgttacatattcgatcgctacgcactcctgctaactcatgtagggatatgtgacacaattggaagagatgatgaaaccgtctttgggcattgaaagactaaagcaaatgaagttaagaacagaagactcatcattaactggactctgaaagagataaccagaaaacagtaggagactagagtgattagttcttgacctggagtgttcttacttctaagtggatgaagaagaacaaatttgaaggcttaaggcttaaagaagcctttaaattgactatggagaaagggagaataatgctcaagaaaactcatagacctcaccagtacacagtaagacaaaagtaaattaggaaaaaataatgtctgggagatagtagactttcagtatttgtttactggtgaatggatgagccattagcagtgaattatgaatatgcttgaggtttcttgtgagtcacctgagaaacgattaataaatgagaactttttataacccacagccagagtatatagatgataatggtgagcggaaagttggaaaaaagtttaaaagagaacaggctattgatatttttacgtagagagaagaagaaaagttcacctcctatttggctttttttttttttttttttgagacggagtctcgctctttcgcccaggccggtgtgcagtggtgtgatcttggctcactataagctctgcctcctgggttcaagccattctcctgcctcagcctcccgagtagctgggactacaggcgccagccaccgcgcccggctaattttttgtatttttagtagagacagggtttcaccatgttagccaggatggtctcgatctcctgacctcgtgatctgcccgcgtcggcctcccaaagtgctgggattacaggtgtgagccactgtgcccggcccctatctggcttttcaccatgatcagtttaaaagaagacagggcaaggagagagggcatgttagctagtttcaagtattcgaagggatttcttctaaaggaggtattgaacttattttgcctgattccagaggatggggaaggaaggaaacatcacatgttcagccaaattagccaagtaaacctgctctcagttgcagccagacctccctgcccttagattctaggaaaatagtaaagaagacgaagaacaagacctcagtgtatccttttactacaagtgactgtaaatcaactataaaattagccatgtttgtaaattaaagttataattttggcccaataatttataacatatctgtttgttgtttgtaggagtggttctaattaaagcccagatttcagagctggcatttcctcttacagcagctcagaagatatctctaaatgctcacagttctctgaagagtattttttcttctcttcccaacatcatatatactggctgtgcaaaatgtggattggaactagaaacagatgagaacaggatctacaaacaatgttttagctgcttgccatttactatgaagaaaatatattataggtaaggcaactaagcaagccaatttgatggaaaataattattatagatctggaaaaactagtctgtaaactcttactttctaaaaagaattaactagagctagtcgaagagaataaaattttccctgagtgatagatagctatttatggtagcaaaaattacccaggaatcgttataggaatttcttaaagataggaatttcttaaagcagtaattgggagattttattgtcttcaaacagctgtaccaaagaaacattttccttggtttactttttaaccaaaatctaaatgctcataaataactcattttcccaccttaacatataattagaatttaaaggctaaaagtatcatatgatgtcacctctgagttgttgtggaagctagtaagacatttaagctgttttcccacctttaccttagaaattaaagccagcaaataaatgttgtatggtaaaactgctaatcagctcagtgaaaaacacattgttttttgaataataggtagtcaaaagctcagacatttttctctttaccttataaattacatgtgtttacaaaatagcactcagtgttttatgctccttatgattatttctaaatattgcggtatctaaaaactaaattcagatatattccacatgttatcatggcatacttcaagaaaagttatagaagcttaatttgtaaaccttatttctctttacagatattatgtttgttataaataagtgaatgaattttgctattactgtgaaagttgcttttgtggaaaagaagattgaattaagatgtatggtaggctgggtgtggtggctcatgcctgtaatcccagcactttgggaggccgtggtggggggatcgcttgagcccaggggttcaagaccagcctgggaaacatagggaaaccccatctctaccaaaaaaaaaaaaaaaagctgggcatggtgacataggcctgtagtcccagctacttgggaggctgaggcaggaggattgtttgagcccaggagatcaattgttacagtgagctatgtttgcaccactgcactctagcttgtgcaacagagtgagaccctgtctcaaaatcaaaacaaaaaatgcatggtatgtaacaaacaacattgatttattaatagttaaggcccctcaaaagtatgtataggtgacttatttatatcattccaaatgtttctattcaatataagcatttattggacaaaaatactgctcaatactattccttatggggaggagggcctttgaatctttagtttacaaaatgactgttcaagagaaggacttcacagatcagtatcacctgattatggcataactagtatgaggtatttaagatctcttcctaaactataccacattaaagatgtagtgctagtttgttgtcttactagaatgttgaatggtcatgttaaggcaagaattattattttttatttatttaaaagccttttttttttattttttgagacagagtttcgctcttgttgcccaggctggagtgcactggtgcgatctcagctcatcgcaacctctgcctcccaggttcaagtgattcttctgtctcagcctcccaagtagctgggattacaggcatgtgccaccacgcctggctaattttgtatttttatagagacagggtttctccatgttggtcaggctggtctcgaactcctgacctcaggtgatccacccgtctcagcctcccaaagtgctggaattacaggtgtgagccaccaagcccagcctaaaagcctttaaattattagagtccagattatgtggtttccttggaaagaaaatattgaaattaacaaactcccttcaagttatcaagtatgtgactccaaaatcatctatataaatcaatcagcaaactgaataagagaaaactctcattgattatttttctaagactcagtcaaatatttattaggaatccacgtatgttcacatatcacatgtgtactgtggatgttatactagttgatctaagtagacttattgtgcccaagaagcttggtagtccatttaagaaacacttaatgaacatttgtgtggcacaacagtcccaaactatgagtgggttgatcatattttacattggttgtaacttggagctgattttccaatggaagcaacattagatattgcaatggagtctcatacgaggccacagacatttattaaattaacatgtagatagcatagttcctgctcttcaagctatcataaaactcaaataccatttttaacaatgtttctacagaatattcagatttacatttttggaatacaagaaatacatttatttttctgtactggaagcaaaaaaccccagcaggtcaaaccacaattaaggctcctatttaggcagcactaggaaatgtttgggtctctcaagaggttgtaatcaaggtgtaggctggggctgcagtcatctgaaggcttgactggggctggaggattcatttccaaagtggctcattcatatggctgacaagttgagttcctcttcacttgggtgtctccacgggctgcctgaatgttctcacaaagtggcagctcatttcctcagagcaggaaaggcaagaaagagagttccaggtggaagccagcctttttgtgacctagactcagaagtcatgtggcatcacttctatcaaattctgttcatcagaagtgagtttagctgtgcgttggagagtggattagaatgaagctagtgcagagaagcggtaagaggctgttgccttattttggaggggagatgatggtggcttgactagagaggaagcggtaggaataaaaagaagtggacagatttgagaatggtcggaaaatagtttgcaagatgtagtgattggtaggtaaagagagagcacaggtacattgcaaatcattgacagttgggtgaacaataagattatttattaaaacaagtaaccttgggagaaatcttgatcatattgagcttgagttcctgagaggtaacaagttggaaagtggttagatgtaaagaaatgcaatttgcaagagaagtctgggctaggcttataaggttatctgtggtgattgaacttttccttggtttctgcaccctgttttgtttttccttcttaatcttcagtgattacctctcataatggattattcttactagcctataaagacagtcccatatttctcttattaaaaaacaaacaaaatcatccattaacattacatctccctcttatcccttcgtttttctattctgttttatacccagccaaactttgttaaagagttgtaaatatactctctctcccctattatgtcttcagtttcacttcagttattccattctactcctaccatgctgcagaagctgcttttgtcaaagttacacttttgatgttgcctgaggcatggatacttctttcctcgctctaactgctctcagttatattcagcatgtcagtccacttcctccttcttgaaacagcctcctccttgctttctaacctgtctctcaggcccttctttctcagccttttctaccccctctttaaatgctggggttaatcttgagctctcgtctgtgtccttcctcttattctttctgtacattctgcctggatgatcacagctgttttcgtatttgtacttaacatcttcaccctgattttctcctccaggctccagtagtcaggtatcaaattctttgcttgatgtccatctcacatttaaacatacccacaatagactcttgtttttcctaaaaccacactcaaatctagttctcttcgtttttatactttctggaaaatggcacaccatctacccaattatttaggctggaaacctgggcacaatcgttgcatcattttctcttccctacctcccctatctaatctattagcaagtcctaggaattttcattcagaactatatcacaaattcatccacttttttccatctccactgctaacatcttagtccagtgtatctcagcaggggcattgttgacatttttctcaggacagtttctcattatgtaccatatcccacatgctgcggggcatgtggcatccctgtttaccttcccctagctgaacctcaattactgtgaaaccaaaatggaaagtcagtgcctgctggtctggaatcactcaggcctcatctgagtccctactacctattgcgcaaaccagcacaccagcagtctcttggtggggctcctcctggccttgcctcctcccctttattctccacccgttggcagtgtgattaccctttgcttcacccatcagtcatctccttgtgcttgtttcctctgcagtctcatctgctgccactcccctgtcgtccagcactctagccacgtggccttctttcagttcttcagacattttgatttttctccttaggatgttctcgaatgtcttccctctgtctgactccacaaggctggtttcttcatgtcttagattaaatgctgctctatcagagaggcctttcctaaccacccttctttattttctgttatagtagcctgggtgtgcttactgtaatttgtatttgcatactgtcttttctaaaaaacatttttactgaagttaaaattcatataccatcaaattaatcttctgaaatgtacaattcaatggctgtagtatattccaagggctgtgtagctatcaccacaaccagttaggacattttcattacccagccctttacaaagcctcatactcattagcagtcactctccattccccatgcccctcaacccatggcaactacgaatctgctttctgtctctatagatttgtctgttctagatattttatataaatattatataatatgtgatcttttgtgactggcttcacttagcatgatgttttcaaggtccatccatgttgtagcatgtatcactacttcattcctttttattgcaaaataatattttattgtatgcacataccacattttatttatccattcatcagttgatggacaattgggttgtttctactctttggctattatgaatgatgctgctgtgaacatttgtgtacaagtttttgtgtggatatgtgtgttcatttctcttgggtatatatctaggagtggtggaattgctgggtcatatggtaactgtctgtttaaccttttgaggaactaccaggctgttttccaaaattgctgcacaattttacattctcatcagcaatatgagggttgtaatttccccatattcttgccagtacttcttattccgtttttctttttgttgcatgtgctttcgggtcatatctaagaaaggtgtcatttctaagccaaggttatggagatttgctcccgtattttcttctaagagtttagtagttttacctcctacatttaggtttattatctactttgagttaagttttgtatatgggataaggaaggggtataattttattttttggcatgtggatatctagttgtcccagcatgaatttttgaaaagactgttccatccctgtttagtcatcttggcaccactgttgaaaagcttattttctttcttcttctttttgtagagatgaggtctcgttgtgttgcccaggctggtctcaaactcctggcctcaagcagtcctcctcaccttggcatcccaaagcgctgggattacaggcatgagccaccgcgcatgcccaatttcttcctatccctctacagttttacgttccttgagtgacggaaccagatttgtctttttcactagtgggtacccagcacttaccacagtccatgatagatactcagtttgtatttgttgaaataaataatggagggagagagaggctgaggaaagagtgtagagtgaaaagaggaaggaacatagagtcatcgtgtgaataaagggggaagtgggtttttagggggaaaatcagtagttatgttttagctctgttacattaaattcccccgctaatgagcctgtttctgaattctgttctcaatttattttttaaaaatcaatgtagttataaaataggtaccacatgccatggttaaaatgcacactacataggaggttataaaacaaagagtgaaagtctccttcaccatccaaccctctcccaccagtgctgcttccatgctggtgagaaggttttttgtatgtccttccagtgatttattatgttcatcccagcacatgtgtatccctttctttagaagcatgtggacagaagaatattgttcatattgttgttccctagagtctatcctggtgctccttccctaatagcacttgcaaatgttcttcattctttttatcagctacatagcattaagatgtaggatgcactgaaaattgttaatccagttttattgatatgcaaaacagtttatttctgataggaaagaattcagttgaaaaaagtaacttgaaattgtgattgtgaaatatgtgattattatttttattttcatttctaaaaataatttataaaacagtttaatatatttttatattagtatctgaaatttaaaaatggatatagaataaataaaatgtagtaatttatcatttgaagctcttggggaaaaaaaaacctttttttccttctaggatgtcacagaacatcctagagttgttttaagcattaaaattaatcctgcataaaaaccaagtgctttttggaattatttttcatttaagcatttcttttatttgaaaatctttttgaaggtcgtgtgttgtttactcttctgtaggccagcgttaatgactgccgttgatggaagacataatgtttacatccatgtagaatcaaagctgatagagaagattcttctcaacatttctgcagactgcctcaacagagtgataggtaatatatcagtgtgccatcaagaagttgttttattcaggagtataaatggtatatcagaacagaaagagcactgtactttaaattaagagcttttctgtccatatgaaaacagaaggataatttagcttaagtgaaatataagcctatgtaagttagaaggttgacttgctttacacctgttagtacatgaacagcgggaggcacctaatttcttcttaacctacatttcctgttggtaagcaaaaactattttacttaactctagttttataagaatgaagtcaatgagtgtatgacataatatatatgaagatagtccagtgtcagtggaatggatttgcaagatcttcaaccatgatgtcttagttgtcagtggctaagaataaagcaaagataatatatttgtcaggtattcaaactccattcctgttctcattagcctcagatcctctaagctgatgagctaatctggttctgtgattgctttatctttcaatagtagattgttttttgtgtttttttttagttgggggtgtctagtaattttgagttgaatgctgaacgttgcatatattaagtagaacagtacaaactgaggtaaatagtagttgtacctggaaacaggcatgcctcttctggtcctttactggaggtgaggggtgagcaggatggtcagccttgtcataagttgagttggattcaggttttgttgtttctctggttaccttcaggtcaccactggtttcaaattatcttgtgcttatggtgggaagtggttccccagtattcctgctccaccatcagcatagccctccactctgcacctgggcctcagagaaagtttctttccatattcttgcacctccccaagttgcacaagcttttgttggttgttatttggtgcatcctaacctggtgggtgggagcagggttgttcctctttgattctggtccagccccagtcttatacggatgttgcacatggcgctttcttggtagccctgtcccttatgtggcatggcagctgagctctgtcttgtgcctttagtgggtcttgtgtggtcctggccctgccccagcagtaggggaccactaatggtcttgacccagggtggtttttcagtcctcccccaggatggaggtttttttttttcttttttctttcccccatctgtactggttcctcacctgtaccctggggcaacaggatttggtgtccctcctccagcaattgaaggcttttgttccttaaaggggaggccagatggtgctttgtgttttgtagttggaagctttctctgatgtcttgccctgcccccagtcttatgagcacctggtggaggtgagacgtactatgtggaagagcctatgaggatgcagatgttccttatgttgctgacactggcagttcattggctttttgcaattaatttattaataaaaattaatcacattcttctttcctgcctgtatggaggacctgtcttcttcccaaggcctgccccaagggaacctgtgctcctgttccatctccctggaggcacctgtctccttatgtttcagtctttttggctgttttacaaccttggttctcatgtgtattcaagaaaatgatgattttatatttattcagttttttccagtaactgttagggtaggagccactttttccagctttctacatcttaattagaagcctctctccgttttttcccccattttctttatttcatttttattcttttggctattttcattccttttcttaatgttacttatatattttcagtgttatctcttctttttttttttgagatggagttttgctcttgttgcctagactggagtgctgtggcgcgatctcagttcaccataacctctgcctcctggattcaagcaagtctcctgcctcagtttcccaagtagctgggattacaggcatgtgccaccatgcccggctaattttgtatttttagtagatatggggtttctctatgttagtcaggctggtcttgaactcccaacctcaggtgatctgcctgcctcggtctcccaaagtgctgggattacaggcgtgagctgccgtgtccggcctatctcttcttttttgcataatgtaaattagtctttatctcttagagaagcataattctcatatcacatatacttcagtgttttgtccattcttgagacaattaaagttgtacttcttggcattaattagattgtgatcataagtcaaaatgtcattggtcataaagtggtcatcagaccatgcagactattactaatattggttatgttttagtttattgcagtgaaaatacaaaatttaaaagttattgtagagaattatcataccccccaaaatatgtcattggtcctccaggactctgtagtccccatccaagaaagactgtgataattgtcaaggggttagtacagtctgagcatggtcgatggtgctctgtcattctggtattgaacaacctcccaaatgtcttgattacatgtcctaaaaaagtgaggggaagagtgtaggacaaatgcaaaataaaataacacatttagctatacttttagtattttttattattgagattcaatatttaagtgaccgattcaagattcttttatataaaaaatgaatatatgcataagtaactgtgataagaactgtggatggataagagcactcgtctgatgtactgcagcataaccagaactgctgttggtctgaacggtgtgttatctgggcctgtttcttgtgtcagggggatcacatgctgtcactctggagtgcctcaatagcttgtaactagaaagagaaggtatagaaagagtagtttacttacctgtttatttatttagaggcagagtcttgctctgttgcccaggctggagtgcagtggcacaatctcagctcattgcaacctctacctcctgggttcaagcaaatctcctgcctcagcttcccgagtagctgggattacaggcatgtgccaccactcccggctaatttttgtatttttagtagagacagggttttactgtgttggccaggcatgtctcgaactcctgacctcaagtaatccagccacctccgtctcccagagtgctgggattacaggtgtgagccaccgctactggccgggaggagaaatttaaaatgggtttgagacttgaggaaccaaaagaaacaatgaaaccattcaatgtgtgtgctcctgtcaagctagcagcgatcttgagagctctgtgttttcgtcttctgcagttccttcctcagagatcacctatgggatggttgtggcagacctgttccactccttgttggcagtcagcgcagaaccttgtgtattgaagattcagagcctttttgtgttagatgaaaacagctatccattacaacaagatttctccctcctggatttttatcctgacatggtaaagcatggagccaatgcccgtctctgaggccagaggaagaaattgcaggcatttcaaggaagaagtactgaaatgatttgtcttttgaaataaatgaatgacagggcttttgctttggattttttatgaaatatattttacaaagagaattgcactagatatataaattaaaacttttttctaagaaaatcctgtgaggtttaaaaagattgtttttgtcttttggtttcttcctttcttctggagaaatgatctaccagtcaaggcaatatgtagcagatccctgggaattaaaggtttgcccatttgttcactgtatttagtccctgctacattccaggcatcgtactaagtatggggaaccacagagaagacactccttcagaaactgctgcagtgctttcgcttatccctacctaaaaaaccgtcaatgtgaaatcatttccttgattataactataatgataatggattagtttatataaacctatgtttagacaagttcaagacaagcgtgtctttctataaaaagtattgaaagtgaaggaaatgagatcatgtttcaatttattaaagcagggaagagcgttctgtggttagttcgtgtctaggatttgagtgccttactgaatgtatttaccagcaaacatgtagcaatctgttctctcattgtgattgtggaagaagctcatgtaaaatgatagtcattaatgaggaagtatggcgtggtacttattctgtaagttcagagtatgctgagtgttaatagattgtcatattgcctgaaaataaattcatgatgacatgaacaagcttcttttaccctgtgtatgtttttaaaaattcctttggttcagaggtggttgttgttttttaacttggcttccctaagaacgaaccacaagagttttgtgattctttcaaaaataatatgccaaaatgcctttgtgggagcacacacacacaaatgcatgtttctgtggagaaggatccatagctttcaacaaatcctcagagggttctgtgaccaagaaaggtaagaacaaggctttaactgatgagtttctttgtggggtagataagggaattagagcaaatgattgccaaagttttgtctagcaactaataaggtgggtacagaaagaattgactccattttgtatctagagagactggaattcaaacaaaatcattggctcccttcaatgattcgttgaatgggtgatgaaacttgagcctgtagttgacgccttctaatctgtgctctctcaactataaccacactaggcagagatttggaattctgatataaaatctgcccagtcaatataggccaaccaagagagctgttcgcttaagtgtgcccttccccacttcgtcctcaagtggagacctaatccctacatcaaccagaacataatccccaggaagagatggctcttcacatcctattgggaagaaatctttaaaccatttcaggtgagtcaacagatcacaccaacatctcttcacagttgttggtatgtatttcattaattaacacatatttccaggagcccttatttaggttgggaactgtttcctccagtcctgaggaatctgagctatctacagaagttatgagctatttaagtgggatcaggatcagcccattgctcctgctatggtctgaatgtgtcctcccaaaattcttacgttgaaacctcatctctgatggcattcagaagtggggcatctgggaggtgattagatcatgagggctctgcccttgtgaatgggatcagtgcccttacgaaagtggcccgagggagcttctttgtccccttctgccacaggatacagccagaaggtgtcatctttgaagcagagagcaagccctcactagattctcaattttctggcaccttgatcatcccagccttcaaactgtaaaaaataagtttctgttacttataaattgcccagtctgttattttgttatagcacccagaatggactaagacaccttctgtgtgtattctttacctgagttgacaagtaagtgtctttattctgttatgttttcataaaactcagtggggtagccagagtgtcatccagcagtcccatatctggcagtcttatggtgggcatttcagggagacctcattcttcatcttctgttagttcagcttgcagggacagctctcctatttttagagaatcatttttatttgttagtcacttagtttccccagaggtatcctttttctaacagcgttagaggcattcacctttctccccactagtaagatctgtgctgtttcattttacatcttttttttttttttggttgggggaaagggggctgatcatcaaatgagttgacaacattgggtgcatgatccaccctgcagacgttcgctgaatgtctaccatgtgctaggcactggaaatgcaaagacacaaatgtctgccttctgtaagttcacaggcaagctggtgaagaaatatttaaacaaaattatatcagcgccaggattaaatctgtgtggaatacagagccaaggcaaaagaggtaacagtaggatgggtttgttagtcatgactcttggttgcaagtgataaaaacccaactcagagtagcttgagcaaaaaagggggacttgattgactcacataaatgagggtagtaccagcttaaggcacagttgaatccattggcctaaattacctggttaccccaactccctaatctttctttctttctttctttctttctttctttctttctttctttctttctttctttctttctttctttctttctttctctttctttctctctttctttctttctttctttctttctttctttctttctttctttctttctttctttctttcttttttttctttctctctccctctccctctctctctctctctcatcagaagaggtcttttacgctgttattgcaaaagcatagatgtttctacagagttttgataggataacattttcacagtgattatgaatttacatcgtccctagaattctaaactactgggatctgaggccgtaagttgtttaagagtattctgacattaccttagattcagcaaaacttgaatagttgatcatgcctttcttagaagaaaatatctgtaatttctcagaacaatatagaatgagacagaaaaactaaccatccctatgtgccttattttaagtgatatatttgtatcctgatgggtttctaggtgttggaacacaggtcatgaatcatagaacaattagaataaagtgttcgtctttatcagtagcttaattctggcccttgatttaatgtcaacaggggagaaatgtgtgagaggggatgaggtttgccaattaattgtcattatgtctttggaggtcttgaacctgatttgttattaagaagtgaattctacccacttaaggcatacatttgctaaaggtgacctctctgcttccacgttgttaagaaatcgtgatttttttcaaaaccatcatcagctttacagtttttgaggaaagatctagaagcctgttaaaatggacttaccaggcagggttcagcccaggaaacacaagccactctgggtattctaaacagagagagattaatgtggaattcaggtgtttgcaaaggtattggaaggctggaggagcaggcatcagtctgagctccaggaggctgccacgtgaacggtggattcatgaaaacatcatcattggctgcaatcttagactgaggatgcagctgctggcatcccagcaactgactctcaagcacatggaagctgggagttatttgctgctgcccaaaactcagtccccacagctacacttgccaggaacagtagcttcaggaagatagcctggatttcactcatcttccatattgcacatgtgtgtgtgtttcattgatggaacatgattcacgctgagagctttagctgcaagaaagtttgggaaatatgtcttctctgaggcttttggtctttgcagttcaggagcagttaggaggtgggactggttggttgcagagtgagctgatttactgcacttagtctagcttattaaaggatcagcttataaacaccccaggtaatatcacaatacataagtgctacctaattactgtgtgggtctgttaccaagaatgtctaagtcaagaaattgaagattgtttccttcagattctgcatcctaatgtagaatctttcctattagagtataagtaaattattttggtgtgttatttaagaatatttgtgaataggcttaattaaacaccatgttaagaaattataaacttaaggccaggcacagtggctcacgcctataatcccagcactctgggaggctgaggcgggcagatcacttgaggtcaggagtttgagaccagcctggccaacatggtgaaacctcatctctactaaaaatacaaaagttagccaggcgtggtggtgcacacctgtaatcccagctacttgggaggctgaggcaggagaattgcttgaacctgggaggtggagcttgcagtgagctgagatcacgccagttcaactctagcctgggtgacagagtgagactctgtttaaaaaaaaaaaaaaaattataaacttaaaaaaaaaacgttttcctttaaacaaaaacgcatgttccttgttttttgttttgttttgttttgccttttttgagagacggtcttgctctgtcacccaggctggagtacagtggcacaattatggctcactgtagcctctacctcctgggcgcaagcaatccttccacctcagcctccctggtagctgggactataagggcagaccacaacaactgattttttattttttgtagagacagggtctccctacattgcccaggctggtcttgagctcctgggctcaaccgaccctcttgccttggcctcccaaagtgctaggactataggcgtgagccactgcaccaggccgtttctttttttttttaactttggaaaatatggatgaatgaaagtgagaaaagtaacccttctgttattctaccaaccaaagctaattgctgccaacattttaatagatattccttcagttgttttatgcatgtatgattttgtacatgtgtctgctttaaaatatatagtctttcaatgttgcccaggctggactcaaactcctgggctcaagtgatccatcacctcagcctcctgcatgtatctacatcttattttattttatttttagagacattctgttaaccaggttggagtgcagtggtgtgatcatggctcactgcagcctcagcctccctgggctcaagtgatcctcctgcctcagcctcctatgagtagctgggactacaggcatatgcctccatacctggacactttttgtattttttgtagagacatgtttttgccatgttgcccaggctggtctaaactcctggcctcaagtgatcccctttgcctcagcctcccaaagtgctgggattacaggtgtagactaccacgtctggccaacattctcattgatagtctttgcacacatctttcattccttctgggaatttattctaagaaaatagaattttggggtcaaagtacttgtatgtatgtatctgtaccaggaaaaaagcagaaattccagtatcaacagataacgagagccacgcagggtggtacatgcctgtagtcccagctactcaggaggctgaggcaggaggattgtgtggcatgagcccaggagttagaggctacagtgagctatgattgcaccactgtactccagcctgggcaatagagcaagaccctgtctctgaaaaaacaaaacaaaacagataaccattgttactattttgttgaacattttccagataccctgatagaagacagatctgtgcatgcacatacacaattttacataaatgggaccattccatataggccagtatctagtgtgtactttttttactccacaatttgccatatacgtctttccaaatcaatcaacatagattaaatcatatcaactacacaggattccatcatttgtgtgtgctcttgaatcctacttttaaaatgttctcagaaaggttatcctgaaatatattcctatcagaagttttccacactctctctaaactgaatggcataagtgaaagactagttgttaggtttaaaaaaggttatctgttttaattggaattttttttgaggttttctttttcttttttctttttctttttttttgagacacagtttcactctgtcaccctggctggagtgcagtggtgcgatcttggctcactgcaacatctgcctcctgggttcaagcgattctcctgcctcagcctcctgagtagctgggattacaggtgtgcaccaccatgcccagctagtttttgtatttttagtagagacaggattttgccatgttggccaggctagtcttgaacttctggcctcaagtgatctgcctgcctcagcctcccaaagtactgagactacaggtgtgaaccactgcgcccagccttaattgaattattttattgctaaagtgattgtacatttgcttcatatgcttatcagtcatttgcagtttgctttttcatattttaccttagaccatttttatgtgggagaagccttttattaaattagtatgttctccttataaagttagtaatttttaacatgtgttgcagacatttttcccaagcttgttatatatgtttgacatgcagaaatcataaatatttacgtggatcaacccatcaatctttttctttattgtttctagattttatggcatgcctagatagcttcttttctactataagattatacacattttcttcaaaaaattttctgaaacatttatgattgttatatttgtatttaaatctttaattatctaaaatttagtgcatggtatgaatggatctaactgattcattttcctaaaatggtcagctggttgtcccaacactattgatttctttctttcccatcagtgacatagatgtgatctttattataatatgaaattattattcctgctagcattacctgtggactttctagtctgtttcattgttctatatttattgctgagccagaaccatacagttagaattattataactttacatctgataggaaaagtacccccatatttttcttcattaaaattgtttttctcagacatctttgcccatctgttcttttttattccccattaagagtatatgttgcagtgttttttagtatattcagagtgtgtgaccatcagcacactcaattttggaacatttcatcacccccaaaagaatcatccatagttacattaactataccaccccacagctcttccttaagaggagctaacagtcgctcctccatacccaccccctttcccccaaccctaggtaaccactcttctacttagtggctgtatagatttcactattctgacatttcacatgaatggaatcatacaatatgtggtcctttgtaactgatttctttcacttggtatagtgttttcaaggttcacacatgtagcatgtatcactacttcattgtttttattgccaaataatattccattgtatggatataccgcattttatgtatctattcatcagttgatggccaactgagtttttcccactttttggttatttttaattgtactatcatgaacatttgtgtgcaagtctttgtgtggatgtatattttcatttctcttgggtatgtacccaggagtggaattgctgggttgtatggtttaaccatttgaggaactgccaaacttttctaatgcaggtgcactattttacattcccatgagaatgcattggagttctgatttctccacatcctcaccagcactttttattattatctgactttttgattatagccatcctagtgggcatgccatctgttcttgagataagtttagaatcatttttatcccattgatatttttaatgagattgctttgaatttatggatcatttggacatgttttcagtggttaaggcttactatttaagaagagcatgctttttcaattaataaagtattctttaatgttccttagctttagctttatttagcagtccacatttaaagggtattaactatggaaatttttttttttttttgatacagggtctcactctgttgcccaggctggagtgcagtggtatgatctcagctcactgcaacctctgcctctcaggctcaagctatcctcccacctcagcctccttggtaactggggctacaggcatgtgccaccacacctggataatttttgtattttttgtagagatggagttttgccatgttgcccaggctggtctggaactcctgggctcaagcaatccacctgcctcagcctcctaaagagcttggattacaggtatgagccatcagccagtttttttgtttttttaaatcattgatttcaactatgctctgttgaatcccttttccatcccctcatgtctcacatgcctcacataacttcccaggcattgtgttttagaaagtctggtattgtttaaattccaacctcattttgctcttctccagagcatgtccagctagtcactaaagggacttggaatggggaggagataggtgcacccttcctttcctttgactccagctgttggagctggagggagggcgtgaactggcaccgaggtgaattcgaattctgctatggtaaaaacagcaccatatattgaatgctgattcagagcatatacagccttctggagaatttgtcccaattctgcaagacattgccacctagctggtgctgcagcagagtttttaacaggctattccaccattctatcaatccaattgcttcagagtcatgcggaacatggtaagaccattggatcataagcgtgggcccattgctgacatctattgctaggaagtgacttatttgatcacacgcaatggtgtgtgatacactgtgatagtgtataaggcattcgtaagtctcttatggtagtttgggaagaggcactgcatgcagggaaggcaatccgtattcaaagtaagtgtctattcctataagaacaaaatgctgctacttccatgatgaaattcataccatgtaatcagcctgcccccaggcagccagccgattactccagggaatgtcaccatatcaggggctcaatattgtcctctgctactggtagactgagcaatcaagtcaggcttggtgagtggaagttcatattgttcaatatattttaacacagttaggcacaccagctgctgcagctgggacaggcagctccaggtgccagcatgagtgctagctcactataaggctttggctggaccagacacaccacaagcagcttccatggctgttacaagggaacacagttgtacctggaagcttgcagactccaggaaccacagggtcccatagcgggagtcacagctctggcctggggagctcccaggtctgggttcccatagagccacagctctttttttcttctctcttcttgtcatccacaacatggtgagcaaggggcatgtttcaaccttgtttgtgttacagcatttttagtcctgtcatttggcaagtcccaagttcttgtgctacctccaggaagaatgaggtatatagacaagtggagagtgagcaaagaggagctatattgagtgacagaataactcagaggatgtcctggagtgggcacctccattctgcagctgggcatcccaatatctgcatctctcagaagagatgaggccctggagtgggtagctgctctctgtagctggttgtcccaatgtctgctcagttctggctgagcctggggcttttataggtctcagaaaggaagaaatgcacactgatcagtccatgagaggccatggatggccccagaaaaggcatcacaagtttacactctggttcacgggactggcagcccagaccccagccttcacacccatcctggcctgaaggaaaggcctcaccaaggacccacccccttctgtgcaggagcctgtctgcctcctgctgccattcatggcacccaggctatttgtgccaaaggatgcctgcaggccagtgccaagctgccctcagcatctcctcagcttccctcccatgcttgtcagtgcccaaagcctgggcaggggccagagacagtatggtactggtgtatcagcactgcctcaagcatgtgcacacccaccaggctgcaacagcacctgagcctacccacaaccttgctccaagatcagagcagatgtcaagagtggggaggagccaggcaatgggagcagaagatacctccaagtctgcaagggcctggggttttttcctgtgcccccaagagtgtagagatgcctgactctgcagccgtggcttgggcatctgtagttgcatcttgaaggacaggtgtcctgtgtgctccatggaatgggaggcccagatctgcagccactacttgggctgctgcaactgttcccaggaagctctaactccaccaactcagaaggggcatgtttcccacttgtatccagctctttaccatgtttcaccgctgtagctgatgtgacggcagtggctgctccagatggggtgccactgccatctttgtagcagtagataattatactacagtgtatttttaccaggtaaagtaaggtttttatggttcactgaggacaatcaatgccttcataaactagaacctgaagactgatcttctgagaacatcaaagaaagactgtcattggcatgcacactacagtaaaacttcaggaccttgaaccttgggttcataatctcacaactgagaaggctccctttacactcttggaactgtacacccattagaagccttaaagaaaagctaaccaggggggtttctccccagaagatggcatccttgactgtgaacaggttttcccaagatcatggatcaagaattctctactatcatgagactcttatctttgattatttgtcccttgcttatgcttctatgaataatagaagtgaaagggttctcttgtgtgcatttatggggtatacttttatttgtgaaggattttgcagccagccttatacatggataaccttataccttaatagacaaaaatgaaggcccaatgtagatgagaaactttaatggtacgtacattgcctcataatcagtcagaaacagaacattgatttactcctcttaacccacatcatgggttaaggagaacatcgctgggaggctttcactcttctaaaagggcatcatttgttaggtcctttttccatagtttggaataaaagcggcaaagattaaaaatgtattcctcatgataggctctgaagcagattctactgtaaaggctatggttacacaataaactttaaattctcttgtgaaagttatgctaaataatagaattgatctggataagttactagctaaacagaagtatctgtacagctgctggcacttatggcctatggggaaaacatcacatattatagatttagttgtaggggattaatgaagagactcttttttttttttttttttttttgagacggagtctcgctctgtcgcccaggctggagtgcagtggcgggatctagcctcactgcaagctccgcctcccgggttcacgccattctcctgcctcagcctcccaagtagctgggactacaggcgcccgccactacgcccggctaattttttgtatttttagtagagacggggtttcaccgttttagccgggatggtctcgatctcctgacctcgtgatccgcccgcctcggcctcccaaagtgctgggattacaggcgtgagccaccgcgcccggccgagactctttagttaagtgagtagactcttcatgtagctcatcctttgatctatttaattttgggtggtttggtttatggggaccccgggtaaggagcacactccaaactcttggtattatcctactgatagtcataataatagtctttctggtgtgctatattctctttaaaagtgttaaatgtttgcatgcagacatctctagcatgtcaaatggtctctctttaactggaatgacaagagctgaaagaaatgtgcagccatgaggacaccgtaacttatgaatgacatgctgagaccagaaatccacaatgatggtaactgagagtggtgctaaggccctaagtttggtcacactctcacctaagtgagaacatgacctaaaaaaaaggggattcttttaaatgaaattatgggaggccattgttttggactgagctcatgcactaggccccaacagaccaaaccagacaaaactggggttgcttgtgctgaatgtaacataatcaaactacgtttgatcatggaaaacatagcaaacagattctagaacagaccaggttttgtttttcttctgtaaacagaatgttccaacatatggacataccctctactcggtccttgttcccatctttgccaaactcactgttctgctctttcccagtaagtttcaagagccatggtaatagtaacatcaataactaaagttttggtcaatatctcaagattgagaaaatgacccaaagagggaaattgttaaatcaagtttagcctaaagctgcctccttacatattaaagttcaacctaaaggtttttctatacatcgtgaactataacaagtgaagttgtaaaccaactgtagcccacatctgtaccaatcactgagttttggccaaatgtagctaacagttccaaccatgttcaaataaggcaaagacccagctgcaaccaatccagttgcttctgtacctcactttccttttgctgtccataaatcttcttccaccacgtggctgcgctacagtctctctaaatgtgctgtaattctgggtgctgcctgattctcccatcattcattgctcatactactttacatttaatttggttgaaatttttctcttaacgacaatcatagaatcagtgtaacaatctgtcttgaaaagtagtaaagtgtgttacttctataggagaaaacaagacatctgtaatgataagccagaatggtcactgcaaacagcaagatgtatatttaactcagcctattctttgtgtaaaatatatatatatataaaatttaaagtagtttgagcaatgaacgatgggagaatcaggcagctcccagaattacagcagatttagagagactgtagcgcagccacgtggtggaagaagatttatggacagcaaaaggaaagtgaggtacagaaacaactggattggttgcagctgggcctttgccttatttgaacattgttggaactgttagctacatttatatatatataatctatttatatattattaaatatatttacatttttatatattatatattattaaatatatttatttttatatatattatatattaaatatatttatatttagatatattatatattaaatatatttatatttagatatattatatattaaatatatttatatttagatatattatatattaaatatatttatatttagatatattatatattaaatatatttatatttatatatattatatattattaaatatatttatatttagatatattatatattattaaatatatttatatttagatatattatacattatatatttacatatatatttatatctttttatatataattttaaatttataaatatttatatataatatatataatatatttataactttaaatttataaatatttatttatatataatatataatatatttataaatgttaaatttataaatattaaatttatttatatttatttatatataatatatatttatttatatattatgtatatttatatatatggaaaacacattttaactagcttcttcactctctcttttatcacttttttacttagatttagaacaatgtgaatagttcatgagctcaaatgttctcccaagttcagttaataacaccagcttgaggttgctgtacacacttaaggaaatgtgctaatatttaataaaactaatattaataattacctcatagaccctccactctttctctttttcataataagcaaatctcctctttttataaggctcacattggagggtttatgccatatttattttaatacaccgactttgtgaagatatcctgagttctagaattttttacatcaacatttttcagattgatttgtcatgaatgttattccctgtccatctttttttcatctgtaactgtttattaggacttgttatgtaccagacattttgctagcaactttataagcagtatcccatgtaatcctcaaaatactctatgaggaatttttgttatttattctcctttacaggcaagggaatctaaatctcagggaagttcattacctgttccagtgttacagaggagaaaggtgatggaactgggatgttagttgcatccaggcaatcctacatcagctctcacttttaatctcttcccaactttgtctctctctatttcttttcagctgttaatgatttcatatgtatgattgattttgcctgactgagccaaactatattagcatgttattagattagaataacttaatctctttacttggagaaaaaaaaaacaaatcaattaaacaactgcactgatgagacagaggaactgttttaggcataatgtagtctagaagttttttgagtgtgatcaacagaccaacagcatccacatcatacacaaatgtattagaaatgcaaattcctgggtaccattccagcatgaatgaatcagaaactaaggaaacagcaatctgtcttttaacacatcttttaagtgaattttaaattctaaaatatattaaccactgccataacaaaggggtcagcaaattaatgaacatgagtcaagcttaggcacctcctatttgtttgctttttaaaatttcaatatgatatacatacatcatttaaaaatttttaagtgtataattctatggtagtaattacatgcaaaatgtataaacatcagaactatctatttctaaaattagctcatcactccaaacaaaaactatactcataaaacagtaacaccttttaactctcccctcacatcctagtaatcactaacatattttctatctctatgacttttcccattctagatatttcatatgtttgggatcatacaatatttgtccttttgagtctggcttatttcacttagaaaatgtttttaaggttcattatgctgtagtgtgtatcaaaacatcattcttttttatggctgaataataatcctttgtatttatgtacaacatttttgttcatctattcattgcttaaagattcatctgttagggtttttctaccttttgactattgtaaaaaatgctgcaaaaaaaaacactggtgtacaagtatctgtttgagtcacgcttgaattattttgggtatatacctagaagtggaattattctatgtttagctttttgattaacctccaaattgatttccacagtaagcgcacaatttgatattcccaccaccaatgtaagtgtctttaactttatccacatcttggctaaccctttttcctccccctattctctctctctatttatgtatttatttatttttattactgtcatcataatagttgtgaagaaggccaggtgtgctggctcatacctgtaataccagtactttggaaggctgaggcaggctgatcacctgaggtcagaagttcgagaccagcctggccaacacaatgaaaccctgtctctactaaaaatctgaaaaacaacaacaacaacaacaacaacaacaacaacaacaaaattagccgggcgttgtggcataagactgtagtcccagctgctcggggggctgaggcaggacaattgcttgttgaaacaggtgtcctttcctcactttgtttttgtttactttgttgaagatcggttggctgtaagtatttggatttatttctgggttctctattctgttccattggtttatgctcctatttttataccagagcttttgcactgcaaaaggaacagtcagcagagtaaatagacaacccgaagaacgggaaaaaatattcacactctgtacatctgagaaaggactaatatccagaatctacaatgaactcaaacaaatcaacaagaaaaaacaaacaatcccatcaaaaagtggactaaggacatgaatagacaattctcaaaagaagatacacaaatggctgacaaacatatgaaaaaatgctcaacatcactaatgatcaaggatgggtacaccagaatctcataaatcaccactaaagaacttactcatgtaaccaaacaccacctgttccccaaaaaactatggaaattaaaaaaataggttctttgtcttctgttattgagttttaaagattctttatatattttggatattaaatctttatgagatatatgatttgcaaatattttttccattctgtaagctatctctcactttcttcataataatgtcctttgatgaaccgatgttttcaactttgataaagttcaacttatctagttttttgttgctgtggtatttttggtgtcatatttaaaaatccattgccaaaccccagttcatatttatccctaagagtatcatggttttggctctcatatttgagtcatcgattcattttgaataaatttttgtatatagtatgagtaaattttttacacatggtgtgagttaatttttgtatatgggatgaagcctaaccttaatttgcctttggaaattcagttgtcctaacatcatttgttgaagatttttctttgcccattgaatagacttggcaggcttgttgaaaataaatatttcatatttatattatggaaatataaatatttccataaatatatggtttatgtctggattcaattctattccatgtatctatatacctatcctatgccaattccatgctgttttaattactgtaggtttttgataagttttgaaatggtagagtttgagtcctccaactttgtctttgttttttaggatttccatgtacaattctaggaatttgagaattggtatttcagtaccaattcagtactgtttcagtaaaatgactgttggaattttactaaatattgtattgaatctttagacagctttggtagttctgctattttagcactattaatttgtcttcaaatccatcaacacagggttgctttcaatttgtttagaacttctttaatttctttcagtgatgctttgctcttttcagtgtacaagtgttcacatttttcattaaatttattcttaggtgttttgttcttttagatactatcataaatggaatttgtttcctaattttgtttttggattatttatttctagcatatagagacatgaatgaatcttgtgtgttgaccttgtaatatgcacttttgctgaattttttattagctctagtagctttctgatggattttcttcagattttttttatatatagaattatgtaatctgaaaggagaaataatttattcctttccagtttggatacctcttatttgtctttcttgctgattgctctgctagaagttgcaatgttcactagtgattaaagcagacatccttgtcttgttcctgattttaaagaaaagtgttcagtctttcaccactgaataggttgttagctgggggtatttttaaaatgtcctttattaggttaaggaaattcccttctatatgctcagtgacttttatcatgaaggtgtgttgaattttgtcaaacgctatttctgtgtcaatgaattgatctttttcttcttcttctttgctctattacatcggtaatttcagtgtgcttctttacattgattggttttcttatgttgaactacttttgcatttataagataaattcttcttggtcatagggcacaatcctgtttaggaatttggtttcctagtatttggtaaagatttttgcatttatatgtgtaaaaaatattctcctgtaattttctttacttgtgatctcttcatctgaacttacactaggggaaatgcttgtctcatagaatgaattaataagtaatatctccatttctgtttttggaaaagtttgccaagcaatttctgccagttcatctctaaatgtatcctagaagttactattaaaaccatctggtattcgcggtagctcatgcctgtaatcccagcactttgggaggccaaggcaggcggatcacgaggtcaggagatcgagaccatcctggctaacacggtgaaaccccgtctctactgaaaatacaaaaaattagccgggcgagatggcgggcgcctgtagtcccagctacttgggaggctgaggcaggagaatggcgtgaacccaggaggcggagcttgcagtgagccgagatcacgccactgcactccagcctgggtgacagagcaagactccgtctcaaaaacaaaaaaacaaaaaacaaaaccatctggtaggtatcataattttcttgattgggtgggttttttactacaacttctatttctttacctgttattggtctgttgacatatatttattatttcttcttgagtgagcttaggtaattagtgtgtttctagaaaattcaacaatttcatctaggttatctagtttatggcctaatttggtcatattattctcacaatcatttttatttctataaggtcagtagtaatagccccagttttatttctgatttcagttatttattatctcttttcttctttatcagtatagatttgtcaattttgtcgattttttcatagaatcagcttttggttttattatttctttctctataattcctgccctgtattgtatgtatttccattttaattatcattatttcctcccttctacttgtgtttaatttgctcttcttttctggttcataaaagttcgaagttatattattgatttgagatcttttgtacatttttaaatgtaggctcttacaactataaattttcatctgagcactgcttttgcttcatctcataagtttagtatgttgtgttattacatatcttcagatatttgtaatttctcttcttcgatccattgcttgaaaaggcactcatggtttaattgccatatattgtacatttttcagtttttctcctgctgttgatttaaagttccattccattgtgttctgagaagatgctgtgtataagtttaatgtttttaaaatatactgaagaattctttgttgcctaacacatgggctatcagagagaacatgtattctgctgttgttgggtggaatgtcctgtgtatgtctattaggtatagttgatttatataaacactatactttaattcccctatttccttgttgcagattttctatcaagaatttgaagtggcctattgatgtctccaactattattgcagaactacacattctttccctaaattttgccaatgtttgctttgtatattttgggggctctgttgtttagtgtgtgcatatttataactgttatatcttcttgataaattgatccttttattagtgtttaatgcccttgttccaattgtaacagtggttaaagtcaattcatgtcatattagtagagccacaccacctctcttttggttaccatttgtatggaatatatttttctgtttttcactttcaatttatttgtggcttgcatctaaattgagtctcttatagaaaatatgtagttgtatgattttaaaaatccattacactgatttttgcctctcaattggaaagtttacttcatttacttttatagaaattattgatgagaattactactgccattttgctttttgttttctataattttttgttcatttcttcccttaatactttttttgtgattagttgatttttatagtgaaatgttttaaaaagctttgtcattttcttatgtgtgcattttaaaaaaattgtctctaactgccataaggattctatttaataaatttataatcatctatgttttaattaatgcgaacataatttcaatagcatgaaacactccatatctatgtagtccccttacccatttcatgttgtttcacaaattacattcatatacattctgtgctgaataacataaatttataattatttttataaatttttttcaacacatatagaaaataaaaatggagttataaactaaaaataaaataatgctaagttttataattgcccatggacttactttttccaggaaacctttatttcttcattcatctttaagttattgtctagtgtcttttcatttcaacctgaaggaatctgtttagcatttttcactggacaggtctgcaagttataaactccttcatcttttgtttctctttaaatgtattaattttttactcatttatcacagaatgttttgctagataaagaattctcagtaagtagttgttattgtttttggtctttctttcaggactaaaacatgttattccactatcttctcacctccatcatttataatgagaaatcagctattaatcttattgaaaatcccttgtaaataataaattgattttccctagctacttgcaaaattgtctgtctttagctttcaataatttgacaactgtatgtctcagtgtggatctctttatcttacttgatgtttattcatgtttcttgaatttgtatatttatgtctttcatcaaatatggaaagttttcagccattatttcttcaaatatttgtcctgccttttctctctgtcatctttttctgggattctccttcatatgttggtccccttgatggcatttcacaagccccttaggtgccatttacttttctttattatttttttttctacttctcagacttgatagatagaatagataatttctatcaccctattgtgaatttcctgattttgccttttggctggtaaaatttgtgttgaatttctctatttaatttttttattccagtttttatactttaaagctccagaatttttggctccttttatagtttttctttattgatatttttattttgttcatttattatatttctgatttttcttatttggttgttcaggttttccttcaattatttgagcatgtttaagataatttttaaaaataatctttttgccggcaattacaacatctagacatttttagggatggtagttgttaatttattttgttctattaaataagtcttatttcctatttctttgtatgccttgtgatttttttgttaaaaaaatggacacttgaatattacaatgtgattctggaaatcaaatgttcctacttctcagggtttgctcttttgtaattattgaaggctgtagtaaactcttggtataatgacatttctctactgtttttcagcaaatatatttgttgcatatattgtgaataaagtttttgttctttggctttttttgttcagctaatgtttgacagagttttcttgaacaccaggaactaaaaaaaacaacaaccaaccaaacaacctctctctgtctttactgtttggctctgtctgagtacctctttaaacacttagccagacttgcattaaggttagggatatgtagactaaataaagaatatgtggtacatatataccatggaatattatgtagccataaaaaggaacaagattatgtcatttgcagggacatggatggagttggaagccattattctcagcaaactaatgcagaaacagaaaaccaaacactgcatggtctcacttctaagtgggagctgaaccgtgagaacacatgaacacatggggggaaacaacacacactgaggcctgttaagggtggtaggggctggcaggagtgaaaacatcaggaagaatagctaacggatgctgggcttaataactagatgatgagttgatctgtgcagcaaactaccatagcacacatttacctatgtaacaaacctgcacatctgcacatgtaccccagaacttaaaataaaggttgaaaaaataaaagtttagggatcagtatcagacaaaacaaagatccaaaacactataaaacttaaggacttcttaggtattttttgaacatgcactgtataattggcatgtatgaggcttttcaaatctctcctaactcatgggtgttttttattaccctaattttccaaggaatatctctgttcttattgtgtttccaggccttggatatttgtttatatatcttaaatgtcttttgcctcaagcttaggtttcttaggagtccaacaatatatttaagcaactcccaccacttttaccgcttggatatgctgtgcaatagacaaaacagatgaaagcaccttacatcattcctccaggtagcccccatagaggttaaaacgggccaaaataatttgcaaatgaagttgtctcttctacctctggaaacagggactattctctcacactgggaacgtgggctgctgtctgcaagactgctcttcaactggggagtggttatagaaagggaaagtaaaactgccacaatgattttttattatttttacattgacattttattgctttagtgttcactgtgttgctataaacctgtctgttttccagtgttctgacaatgttgattctgatggcttctactcatttttcaatatttctatggagggacagaagcttggagttgccaaatgcgacatcttgcttatgtcactccctcctatctgttttagtaaacttttttgtgtgcgtgtgacaatacaacaatttaaatttattgcatatactcgtggctgctgttttgctacaatgagttgagttcaaccaagattatataccctacaaaaaactaaagcacttattatctggccaattgaaaaaaaaaacattttctgacctctgctctagactggtaaagttcagatttcacaaatttcaaatagataacttcctttatagccactttgtttttatagtccgccttcacatttaatgagtctacatttattacttagtacttggtatataccaaaaattcttgatctctttcctgaaattttacatctactttagagttaaaaaaataactagaactcagagcatctcagaaatgttcagtctcagcaagctagtgaatgttttactgtgaacagattcacaggctttactgattccagagccaaaatgctaataagtttaaacatatattttggataaaattgatctgcctccataacaaaggcactggtcttacagttaacctgtaaatcagttgtggatgtaaaggcattattgccaattcaatttggttgagatgagctttagtattcaatcctattgttctgagtgtcaattagagccaagagtgagcctacaatgttatcgatgttatcgattctcctccagctgagaacaaagttctagaatggccagctcatttttctggtctttattaacctaggcagcctacacctgcatttatatttaattatcataatgagcttctttttaaaatagtatcacagagggggatcagagtgtttgttcattaaatctctaatgaaacattgtatgtagcataaatgtattattctggattatattacatcacatcaaagtacagaatttaacagaatgtatcccaaactccataatagtttggccagatacagaaacaatttccttcatccctactgagagcagactgagttgtggaattcccaaatatagctttcattgaaatggatgggacttctaagatcagtagtagcatttatatgatgttattcttcaattgtaagccattaatttgattagttatccatttgcatttttacttgttatactgatttcattgcaaactggagaaaaaataaaggaaaaacaagcaagaagatttaactttacaaatgtttcatttccactaatttctactatttaaaaaaagaaatgtaaattgaagcagcataacttaggcaaaaagcattggattcatatttggagtcctggattctactcacaactctgataataattagctgctgcttcttttttttttttttttttgagacggagtctcactctgttgccaggctggagtacagcggcacaatctctcctcactgcaactctgcctcccaggttcaagtgattctcctgcctcagcctcctgagtagctgggactacaggtgcgtgccaccatgcctggctaattttttttttttttttttttggattttagtagagatggagtttcaccatgttggccaggatggtctcgatctcctgacctcatgatttgcccgcctgggtctcccaaagtgctgggattacaggtgtgagccacagtgccttgcctaataattagcttcttaagcttgggcaagtaatgaccattgtgtttcactttaaaattaatgataaaattaatcattttatcagtgatacaattaatcattttatcagtgataaaattaatgtgtaagaaggtattgtctctgcttcagaaaaatatgtgctgtatgttattgttttcactgggaaagaattggcaaattccatattttatattaagctcctcaaattttatgttcctcattgtgggttcattctgtacttaaccttgtattataagacttgctattgtggatgctgtggatgccaaggcccttgtcccactgtggttttactaaaaatctagttgcaaaaggcagattaggaggaaaaaaagacttagaaattcatttaatgagtatacacggcagccttccaaatgcagaccctaagatacaggggaaattaacaaagtatggacagctgtgtagaaatactattggaagaaaggtatatgacctaataatgctaatagactgggtagggaaacccagcaaggcctgtcagtctagatttttcttgacatttctaagcatgtgtttttttcttcttctggttatggggcagcaacatctttggagtgggggtcttaagatgttcagtcaaacgaggtaagtcagataatttctttatggccagttttcacacagataaagtggaggaaaaatcagagtaatatatttaggttttatggctagctttaaagaaaaggggttctaggggttctgtttactatgacccactgttgtggaagagagattctagtttccatggccagccttatgggagaataaaactgagagacaagaggacaggagaaggtcagagaaaaatgtttgtttctgaggctgctgctgagcctttcatttgggggttttgttttctgatccccagaactatcctacattgtaattgcctatttacttgtctgagttccctagttagaccctgtgctccttgaaggcagtgagtagtttttaaatactattttactcaattgcaattgcttaatatctggcacacagcaggacctctacaaatatctgtgcatgaaagaatataattttcatcactcattctattctgaaatgcacacacacacatacacacactgatgaatcaatcaatggataaacagacaggtagataacagctaatagaaaataatgactgcaggttgtataacacaatcaaagtgtttgttgttgtttattttctttgaaattaactggcatgctcgatctcattgacactagcatcaaaatacctgatattattagccgtgacatatgttaactagtggtttctatgactgcttcccatcactactccccacctcagtgatccttagtgatccatttgctcatcaaattgaaactaatttccccaaagcaaggctattatgaatttgaaaaagttgattatttccgagcagataactttaaatgtcatggagcctatttaaagacagctttatagcacaaaccttctgttcaagccttaatgtacaaccaaatggaccaaatgaggcaaacagaatcaggcttccaaatataatcataattctagattagctctcaaaataagactgcagttcatatattctacaaagtatgttttgacattaaatgtaatatactgaggattatttttctgatttacacttgctttggtttctacctttgggtaggtggctctgactgtgaaaaagtcgctgtgagcctgccaggctacatctccctcccagaggtgaaatcatgccctattctccacattgcctttgccttcagattcttatttacatactaatgtttcacaatgtttttttttctcttccttctaaacctaagcagagatatttcctctacctagtgttattcattgtgaggagaggaattttttcttgcaggtgggagagtatagataagggtaataaaattcccatagttttttgttttgtttttgtttttgtttttctgggcatgaactagtagtatttattttcttttaaatcacaaagtatgattgttgtagcacttcttctcagttctattttcttttttaaaaaacaactgtaaattcaattgtacaggcagtttcaagtaatcaaaacgtaatgtattaatcttgacatctgtggtttgtggattcaaatccctacattctctagcttgtaatgtttatgaggtagtggatgtgaagagttcataagtcaaattcacatttaatttgtactggtttcatcattcatcacaaaatatgctactgaacaacagtgagtatgctgttgatatgtaaatgcacaaatatacatgcacacaacatataacaaagcagtttttatgatgtacctcttgcattacaatactcttatgtagctatacaactcctacaagacataaagtaaacacaaaagctattttcttcacttgcatgtatgtagatgtatcctagagaaatgctattgttcctcagaaatggtatttgtaaatgaattttttttaattagacaaacccaaagtactatactatggagtaagtttgtcttattttgtttttaatcagtgaatatagatgactagttcattcacttagtctttcagaagagttttaatatcaaaattatcatatggtctgactttttttaaagcccagttcttacaaaacaataaaatcagacctggtgaggttctgacaactacgagagaaacttagtaccaaatacatatgctatttctccatttgcacaagacagctaatttgtagaaaacagaagactaaaagttggtaaatcaaatgtgttttataattacatctgtgagagaagaatcctcttatgacttctggaaatatcaaaatctgaaatgactaaataactgacatgccaaggaatttgtattctcttgttcttttacacattaggggagaaaatagtaaaaactagcataattgtgtggcaaaatatccatgaaataatattttgaaagttaaaatatggatttaaattaagacaaatggatgtgttttttagatgtgtatgcctaaaagatggatactgtggatatctgatggctttcttgattaagccacaaccggtggacctcacaaatgtcaaatatgttattccaaaatgtcagttgtttagactcatttctcagcttgttattgatgagtttcctttcacatttggaggaatcctgttggggaaactgaagaacagatgttaagtgtgaagtgtctccctccttagttcatattcatatcacattgtttgagctgccacatgtaaacaatatagacactaagccaactggtcctctgcctactgctgatgtggcagaaaatatctaggaggtagccagaggggcatatgtatacctgttaagtggcctggttctccaatagtcgtgcaagtattgctaaatttgtttcgctcctgggaattcaagcttctatttcagattcctaatccacagcattaattatcttttttgaatacccgaagcaatttatgttgcttaacatataataaagttaagtccattattattcctgtcttataattgaggagactagagtctagattatttaagcaaccaaaatcacacagtcagtcaatgacagagcccatgactaaaattctgtctgtccccagatttgtgctcttcagataatgacatttctgcacagttattaatctgagtaaatagagtccatagtgaattattagctgatttcaggagattccatgcaaataaaagtctgtcatatcatgctctgccagtctacattaatacaaatcacaacaacaaggcagtttatttaaaaatattaaaagtaatagaagattgaatggaaggatgaatggatggattgattaagagatagataataaataaattgatgagagagagaaacacacagagagaaagataaaattaaccacactaataaaagtatgatttggtatataacagaaaaagttctttagtttgtttgtttgtgtgtgtaggtattctgtcataaaaacacaattatctaaaacataaagtctcaatcttttgcttaagaaatatttttaatttaggctggttacaactgtgaattaaattttatttttattttttattttattttattttgatttttttttttttttaagatggagcatcgctctattgcccaggctggagtgtggtggcgcgatcttggctcactgaaacctctgcctcctgggttcaagcgactctcctatctcagcctcccaagtagtaatttttgtatttttagtagagatggggtttcacaatgttgcccaggctggtcttgaactcctaacctcaggtgatccgcctgcctcagcctcccaaagtgcttggattataggtgtgaggcaccatgccctgcccaattgtgaattaaatttatatctagaaaaggtgagaaatattattaacgaagacatttctttctatgatacttaagttatacatgtgtagaaggtgcaggcttattgtataggtatatgtgtaccatggtggtttgctgcccatcaacctgtcatctacattaggtatttctcttaatgctatccctacccttgccccccaccccccgacaggccccagtgtgtgatgtttccctccatgtgcccatatgttgtcattgttcaactcccacttctgagtgagaacatgtggtgtttggttttctgttcctgtgttagtttgctgagaatgatggtttccagcttcatccatgtccctgcaaataacgaactcattcttttatatggctgcatagcattccatggtgtatatgtgccacattttctttacccagtctatcattgatggacatttgggttggtcccaagtctttgctgttgtgaatagtgctgcaataaacatatgtgtgcatatgtctttatagtagatgatttataatcctttgggtatatacccagtaattggattactggggcaaatggtatttctagttctagatccttgaggaatcaccacactgtcttccacaatggctgaactaatttacactcccaccaacagtgtaaaagtgttcctatttctccacatcctctccagcatctgttgtttcctgactttttaatgatcaccattctaactggcccgagatggtatctcattgtggttttgatttgcatttctgtaatgaccatttctgtaatgatgagcttttttcatatgtttttggccacataaatgccttcttttgaaaagtgtctattcatttccttcgcccactttttgatggggttgtttttctcttgtgaatttgtttaaattctttgtaaactctggatattagtcctttgtcagatggatagatcgcaaaatttttctcccattctgtaggttgcctgttcactctgatggtagtttcttttgctgtgcagaagccttttagtttaattagatcccatttgtcatgggaagacatttctaaccagcaacaggtccagtatcagggcctttatgtctttgtccacaaagtgagtatgttctgcacagggcagcagtgtttaaggatatattctcttcatggagtaacacccaactcaaactttaatggtaacactttaaatctttccaagctctaaaagcaatttcttctgcttaattgctttttggggactgtaatacatgtgggtattcttactctaaatataattctctgcatttattttcaacatttcttttatggccacttaagtgacttttctctggttatttatgcaatataggtgacaatcctatttggttttctatttgaacattctgtaaaagctgaataacaactccaaaatacaacacaaacatgcagatacatatacaaacacttactgtattttattcaattaacaagtgtgttcactttaattcacacacaactatacctataggcatgcccacacatacaaacacacatacactgtttctcattcctatttcctttgtctgtacttggtttagttatggcacttttgttttgcctctaacatttttattttaaaaagaaaattaaaataggttattgggatcaaagatataagctttttgttactttgaatgatttttgtaattcagaatatgcacttgttatttcagttcttatttttataattattggaagagtttgtctaattaccctataaatccctagagaaaggtagccaccatatactttatttcttggttatatgtataaaaatcagtaggcaatgtaaaaatgtttttgtgtgaatttatgtgagttataattctaattctatgtcaatattcacctcagattaccacatgaaagcttagtcaccaagtatgcctcatactgaaatacccactgattaaatcagttgacgaccagctcctatcttacattcaaatcaccaggatcaatagaatattttcttattatccagattctcaatccattgcttctactcacaaacttctccccatgataaacatacacacatacatacacatctcccagataaattcttatggtcatgacaaggtaatcccactgcttccatttattaaataattgattgaaaatatttaggtgagaaaaatggttgtgtaagagtaatattgttagcaattgctaaaactgaatgtctatgtaccttcaaaattcatatggtgaaaccctagttcccagtgtgatagtattcagtggtgggcccttggggggtaattagttggtgaatgagattaatactcttataggaagagacaccaaagagataatctctttctctttctcagtctctgccatgtcagtatataatgagaaaatggccacgtgcaaacaaagaaataggccctcatcagtcactggatgtgcaagcacctttatcttaaattttccagcctctggaactgtgagaacaagcgttttctgattaagtcacccagtctacggtaatttgttttaacagcctaaagtaactaaaactgcaattatctcatgaatttggaaatggtctgtgtacacattattagtaattaattttggaaaatttactttttttttggtaaatcttagttctcactaaagaatagggatgataacaataccctatccccagcatgtccatgaaaattaaatggtagaatgaatctaaaaagcccgatgtataatgggtataaagtattcaatacatgctgatatttacttcttttcccctttacgagtacatgcaatacggtctgatgaggtctttttaaaactgttcacaataattgacattttacaagtcatatcatgtgatactttttgccaaacctggtctctggcttgatcagttttattttacatttgaaatttgtacttagacttgtgggactactttcttccatgaaagatctaataccctacaaccaaacacttcattatttggaattaaaaagcgaaattctttgattatatctaagctaatttaagtattttaagtatataatgtttaactgttaagtagtttacttcaattattaaaatgactgagtcagagtaaccgattatacttcctaggcacactaggccagatgtcaagaatcaaggacttcattttcagagctggcactcattagctctgggtttggagaattcacttattctcttcattctttctgaatagtttagcattgttttctagatgtgattgagtttaaatgcactatttggaggcttataggttccattcttttagggaaaataattttgaaaaagaaagaataaaaaactctaggtcaaaagggatctatggctgtctcacagcaagagtgaaacactgagatgcctacatggtatataaatattaaaataaagaaggcaagctgactatgaaaaacaacagctgaattatggcaacaaatgaaaaatgtcagtagtatctctactggggacactatggaatggtggggactgaggataattagagaagacaacctgcctacacatggcagcatctactaagacttatgactctgtttatgaagaatatgagtaaatgtcctgatatttaaacacataccaaaaattaagatgttcatgtattttgctaatttgattattttaaagtaataatattttttattcaaacaaatatattgtcagtttaaaggccactgtttcttacgtaataaaatttgctttttgatttgatgcttgaattttttctatgacatcacaagaaagttattggttatacatgaacaaatgcatgaatggaattattattactttcattgacaaatgcttttatatatgtaaaattttcatcttagaaagttattttatgtgtttttagagaactatcctctcttccatgatgcatctttgttagttctatttctttaagtaacattgaagttatttatttttctgtttttgtatatcacattcttattccactaaaatacctatattttcttcagttatgtatgattggatttttttaaccatccagatacatgtcttgtgacataatagaatcttttttattcttagaatgaaagagctaaaccatagtcagaaaacttatgaatttactatatcacagctactatggtgtggtatgtaaattatgtttatgaaaatttatgattattcagattaagtcctgcatatgtaatgttaagatttttttactttatttttctgagaacttgatttactaaaaggtaaataaatcacactaggatataaatatatcattattattttaaaaggtatgccccagtcctcttcttactgttggataagctcgttctgaaaccacagttccagactcttctcctgagtaaataaacatattttaaagcagtggtaaatatctgttttgtctgcaactccatctccaacaagtaatttgttcaacaattgtcagtatgaagtggatgtcctttacatcagctccctagattttttcaagtccattggtgcttcacaacattttttcagaggttatattctagtcactttctttattgtccattcaaaacacttgctgagacctagggtgtcagattctattttgcctgttatttgacattcccttctcttcccaggccatttagctacatatttcctattggactatctgctttggcatttagtaaataaataccgtaagtcactgagggtatgggaagaaatattgagtcatagataccattttctcttagggaattttcctctgaaggcttgcaagtgtggtatagttcagtgtagtgctaccagcttctgttctaaggacacagctaattgggttcctaatccaagataatttaaacagattatttaacctttttatgttagtgtttctattttgtatagtggttataataaaaccatttactacttaagattaagatcctcatagatctgaagaaatattgtactagaatgcttagtgaaaaatgtctgacacataataaatattccatacattttggcctttgctctcattgttatttttaccatcagctctctcaaccttgaaacctggctcagcccctgtggaactgtagtatatcacccctgtcccaaaacgaagacctagaatatttacccttacatggttcctatatccgaggtcccagaaaggtagaagggggaaatgtcacaataatattcaaaatatctgaaagcaaactgttattgttttagtgtgagaatagagcttcatagaatttgacattgtatttccctaaaatattaaacttgtatattctcaacagttatattataaatatttattcaggtatactcaaaatttatccatattaatgataattatttaaatgctctttagctgttcatcaccatattaatactaggaataatgacagctaattttaattgagtacttccaaactgtggcccagttacagtaaaataaacactattagatacactccatcaattattacagcaagtctatgaaacatactgtattactaagccagtattagaaatgaaaaactcatgggaaggatatatataaaacttgctcaaagttacccagctaataaatggctaggacacaattaaacacctatgtagttttctttcctgagctgaaatcctaaatccttggctgtatggcccctcattcaaaagccctaaattggctaaaatttatataacagaaaattcacagaatcatttccttctacttttccactaccagggctgttaacagtcccaagtaaaagggcaaaattttttctacttgagataagaaaaatacagagtgtgacaggtgttccaccaatataaaaacactttaccagaaaaactgagaagggggctgttaaccttcggggaaatgtgggtcttcagtggattcttgctagaaacataaaaacgtagagagaagattttcatttaaaagcctcctcccttcagcaaagtatattctgattccattattgtgttaggctcctatatagttataagtaaccccatgtggttttagaattcttaaatattcacacacatagtcatctgaagaatgaataaatccatgaatgactaaaccaagtttattcctatatcattttcaatatccttaaattatgcttacatccttaaatcggttgcctcattctcaaagcacatagtctgtaactcgtaaacacctgtcggccgggcacggtggctcacgcctgtaatcccagcactttgggaggccaaggcgggcatatcacctgagttcgggagtttgcgaacagcctgaccaccatggagaaaccccgtctctactaaaaatacaaaaaatgagccgggcgcggtggtgcatgcctgtaatcccagctacttgggaggctgaggtaggagaatcacttgaactcaggaggtggaggctgcggtgagccaagatcatgccagcctgggcaacaatagcaaaactgtgtatcacaaaacaacaacaacaacaacaacaacaacaacaaccaaaaaaatatatatatataaaattcatttagtacggaagagtgtgaggaaacagaaagttaaaaaaaaaaattgaaagaccagcaataatctcactttttcaagaatttgttagctctttctgagctccacttaacagttactttcccattcttccctgcacaccgtcaacacataaggactcaaattaagatgatgtatatgtttacactccaaaatttttaaagaaaaaggagagagagagaaaaaagtaaaagaaaagaaacccaaaagggaaaatatagctaaggtgaactggtgagtttctactcagaatccttattattgagcatgatgtattttgttttcttaatttatgtataatgaaaatggaagagaagaattataaatcatagttcatttttatgatcagtacataaataaaatttgagtctttcttggcattcattactttaccttaaaaacacaagagtatttactttttgtgtggcaaagaaggcctaatggggaaccttgaccttcacctcaacttgacagtaaaaaagagctgcttccttccccttttgcttgccatgtgtctgaaaaagactagtagcaagaatatataaagaactttcaaaacttaggagtgaacaaagtcaaattagaaagtgggcaaaagacatgaatatacatttcactgaaaagaatatatgtttggaaaatcagagcatgaaaagatgtcaacatcattagccattagggaatgaaaaattaaaaccccaatgggatttcaatatatacccaatggaatagttacaataaaaaataatgataatactgagtgctagcaaggctgcaaagaaactacataactgctgcatggttgatgggaatgtaaaataacaaagccattctctataacaatttgatactttctttaaaaagcaaacaaagagtttaacaggcaatgacattatgatgcagtaatttcactcctgggcatttacagcagggtaatttttaaaaaccacgttaattcaaaaactttatacaaatattcagaacagctttatttttaataaccccaaactggaaacaacccagacatttttgaaggagtgaataagtttaaacaaaatgtattacattcatgcaatgaagcactacttagcaacaaaaagaaacaagttattgatatagacaacaacctccataaatcttcagagaattatgctgagtaaataaatctaaccacaaaagattatatgatatagaatttcccttgtagaacattactgaagtgataaaattatgagaatggaggaaagattagtggttatcaagggttaaagatgaggtgaaagaggaaaatagatgtggctaggaaagaacaacatgagggattccatggtaatggaaatattctgtatgttgactatatcaatctccacatattgcttatgatattgtactatacttttgccagatgttaccactgggagaactgagataaggttacaagagatctctctatattatttcttataactgtaagtaaatctacaattatatcaaaatttaaaagttattttaaaaagagagttcttaaattaataattcattctcccaaccttagaaattagaaaaggaagactaaactgagcacaaagcaagaaaaacgaagaaataatacagattagagcagaaatcaatgaaatagaaaataaaacaaaaaacaataaagaaatttaaagatccaaagtttgaatctttgcaaagataaacaaaattgagaaatatttagatgatgaataataaaaaatgccgggcacagtggcttacgcctgtaatcccaacactttgggaggctgaggtgggtggatcacttgaggccaggagtttgtgactagcctggccaacatgcggaaaccccatctctactaaaaatacaaaaattagccaggcatggtggcgagtgcttgtaatcccagctacttgggaggctgaggcagaattacttgaacccaggaggtggaggttacagtgaacccagatcctgccattgcactccagcctggatgacagcagcgaaactctgtctcaaaaaagaaaaaaaaagaaagaaaaaagagataatgtgctgactaccaaaatcaggaacaaaggttactactaccaatcctcccccatcccatccaaatatattaattataagggaaatactatgaaacacttttgatcacaaattatacaacttatatttaaggtagaaagtcttaaaaacatataaattaccacagctgaaacaaaaatgaatagaaaatctgaataaatatatcgaattagcaattaaaagtctttcataaggaaatatacaggacttcactggtaagttatttcacatattcaatgaagaaatgatacacatactcagaaaatagaaaaagagagaaacttcccaattcatgttataaggcctatattcaaaggcaaaaataaaaaaagaaagaaaaagaaatttaaaaaataaaaattaaaattaaattacagatcaatatacctcacagatatagacacaaaaatctccaataaaatattatcaaactaaattcaaccatatataaaaatgattgtactccatgactaagtgaaattaatcccagaaatgcaagattgtttttgtattttaaatataaaatgtaatgtaatatactgtgttataaaataaagaactaaaatgaaatgattatctcaatgatgcaggaaaaggatttgacagaatctaacatgaattaataaaaaaaaatagaatggaaattcttcaacctgatagaggacatcaacaacaacaacaaccaaaaacactacattttacagcaatatctaatgatgaaagattggatatttgcccctcaaaattggcgacgtgccaaagatgtctataatgtttactcactaattctatccaatattgcactggaagttatagccaatacaatgaagaatacattgataaagccctcaggaaatggaagtggctgggctcaatagctcaggcctgtaatcccagtgccttcggaggccaagtcaggaggcttacttgaggctaggagttcagatccagcctgggcaacaaagacaaatcctcttctctatgaatttattcatttttttaaattagccaagcatggtggcattcacctctccgtcttaggtactcaggacgttgaggcaagaggattgtttgagcccaggagttcgaggttgcagtgagctatcattgcaagttactgcactccagcctggtagatagagaaagacactttatctcttaaaaaaattaagaaaataattatattcacaatactatacaaataaacccttggaaataaatttagcaaaatgtgtgtaaggactgtatgctgaaaactaataatctaagcaaatggaaaatcattccatgctcatggattgggagacctactattgcttttctagtaattctcccatcatagatctatagatttaatactattgttaccatacattagccatattatatgaacataaatatttcatttgtgagcctcatatctaattatttgttatttacatataaaataattattttaatatgagctctttgaaaagcactttaaaaatggttccctgagaccttggctttcaagttctacttaaactattcagtatgaactagaaaatttagtaaacaaagtgtcatcttctgcctcattatctttttatttggaaaactatgttagactccaaggtattctctctttacttcaatgtaacagaagtaaccagtttaattgttcagaacctgacatttatttaatcatgtcttcttagtgttcaggtttattgtcttcaatgactggatgccagtctgcttcctttttgactttcctaggctcggattcatcagattctctacttgtgccatttggaatggaaagaccctcccacagggtagaggttattcattctctctctctctctctctctctccaccacaatttttgccaagagcaagtcaggtttttggtcaagctaaatttttactgcatgctttccttcaactaagtgtgaaagaaatctattaaataatatttaatttggtctcaaatgtgaaccatactctccaacctagtttttctaccaaataaccatgaactgaaatttacttcatagttttgaccttcataaattgtttgtttccccatttatcttcaattcttatatgttttgaaattattgatatcaactctggagaaaagagtaagtcttacaaccggcataacaacaggtacaattaaagaagtatgttccttaacatgagaagaatgttaacccatttcaatcaaaagtatttcatttttcccatgagtaacactatgctgtgcattgtggagtttacagaggaggtgagatatggtcctgacttcgtggtatacaatttcatttgatagggcaaggcatatgtggtataataaagatatagatgttactgacgtacatgagagccttgtgggctgagttcccttatagaagtggagtctgtgcaatcttgaaaatgggtagcatctggataagaaaagagtcaatcaagtaagagaaatgccccaaaattgcttctatgatagtagaacagcttctttcagaaaaagctacatagacatttaaatttaaaattatagcatcttacaaacaaatatataaataccatttacttttatgtctaatacatttagggaaagtatctaagtcaatgttaaaaattctatttcaaatcctcgcatgcatctcctttcactaattaaataatagtgaactgtgttttgaaatcatcagacacttcaaaattagttttcttttcaaataatgcaacgtagtaaaatggtggacttgcaaagttcttattttactgtgattcttctatgaaaataatgtaggactatttaaaatttttccttaaactttccacaagtgtaaagtaggtaaaacaccacaagcaatatttgctgaattattacaatatattatatgtcttttacttaatatgagttatacactgagaactttttttttcacaataattctccgagatgaagataaagtggatgaaaagttgaagtaaagatgtattcaccctacaagacttaatagtgagtctatgcttaactcaagattgcactggccaagggattaaagaggcagaggagaaactgcttccagcgttgtttcccaataaatcaataaaacttgtcaggtgttttcatccaaggagagagtaacactaacctctatcttcatgtatacattttttccaggcttttggagcttgtcaatgattcctaaacttggctttatattagattcacctggagacccattacaatcccaatgtcaccaggcatggtggctcaagcctgtaattcaagctacacgagaggctgaggcagaagcatccctcaagcccaggagtttgcggctgcagtgagctatgatcatgccactgtacactagcccaggtgacaaagtgagaccctgtccccttctccccaaaaatcctgatgtccaggttatcaaattagaatttttgaaggtaggattgaggcagtgctactaaaagcaatgacaaaaagaagcaagcaagcaaaccacttgatgataatatggaacaaaggttgagaaccaccagatggaaaaagaaaacaaattcattaatactgatcgtctattacctttaaataacctagatctcaagagatcccaatatacaaaagctttggctaggacctgagaatctattataattagcattttcattaatcttaatatctcactcatatcatgcacaaaattcaatgtaagatggatcacagacccaaatataaatgctaaagcttctagaagaatactttgaggaacatcataatgatcttgagtgagataaataatgattttttttcgagagcacaaaatgtattaaacataaaaataaaaattgttaatgtttttactatattaaacttatattcatttattcaaaaaaacctcattacatatataaggaactcctaacaacagaaaaaaataacttaaaaagggaggcaaaatgattgaataaattttcttcaaagacatacaaatagccaaaaggtatatgaaaagatgttcaacgtcactaatgatcaaagagatacaaataaaaaccaaaatatgatatcacttaccacttattaggaggggtaatttggaatttccattccaaaagaatggaaatcaggatgtggtagagttacctgcatacccatgttctttgcagcattactcacaaaacaacaaaatctgaaaacttaaatgtccatcagcacataaatgaataaagaaaatgtggcgtataaatacaatggaatattttcagctttaagaagcaaggacattctgccatctgcaagaacatgaatgaacctggaggatatcatgctaagcgtgataagccagtcacagaaggataaattctgcatgatttcacacatatgagctttctaaaatagtcaaactcatagaaatagagaatagaatggttaggggaaggaggaagaagggttgctgttcaacaggtataaagtttcagttgtgtaagttgcgtaagttctaaagattttctgtgcaacatcacgcctatacttaacggtgctatagtgtacatttaaaaccttactaagaggatagatcacaagttatgtttttacctcaatgaaaaatgaatagaaatgtcacagtgagataacacatttgaaatacacagacctgacaaaatatttctatggaaagtaaataaatcctacaaattgttatgcagaagatacatcactcaattagaagtgggcaaaagacttgaacggtcagttcataaaagaagacagccaaatggggaatcaggaaaagaaaatgtgctgaacatagttggtcatcagaaaaaatgaaaataaaaacctcaatgagatgtcattacatatccaagagaactggtaaaattaaaatggctaaatacctggagaccgatatgggaggatagcttgagcccaggagttcaaggctgcagtgagctatgattgtgccactccactccagcctgtgtgatggagcaagaccccatctcttaagaaaaaaaattggggactgaatatagcaagtgttgaaaaggctatgaaacaaagaaaatctcatacattcgtggtgggagagtaaatttacagctatattttaaagaagtttggcaatttcttataaagttaaactgcacaaatacccaatgacatcgtgattcaatttataggtatataccaaaaataaatgagggtgtgtattcacacaatagagacagatataaaattattcatggcaggttttttttgtaggcaaaaactggatggaacatctataaagtggagaagagataaacaaattataatattgacttacagagtaataatacatagcaatagaaaataaaatattgacacataaaacagcatagataaatctccaaaacatcatgttgagtaaaataggtcagatacaaaagtgtaaaatctgtatgattccagacaaatttgaccagtggttgttactgactggaataaagcaccagaacattttctgtggtagtgaaactgttccttaccttaacatggctggtgtgaatatgagtgcagaaatacataaagttaaggtatacatcttaaatttattcattttatgaaatataaatttagtcttggtaatgcacttccaaaattttttattaaggctataattaattttatatttttatttataaaaatgagtgatatatcacattatatttgaatatttttctaatagaagaccttatggcttaaaattaagtattctctttaataattatcataaatttataatttaataagtgatttataactgcacaataacataacaacaattttatgcttaggtaaaattgtctttattttaaatttaagtagtacagcaactttacatggcttacctaaaccacacagttattaagtgatataattgggactctaatccggggctgtttctaagtaatatgttcatttctctttgaatttataacttgaatacatctttttaaaaaattattaatttttaaaatttaattaattagttaagatactctcaatttattgaagattatgtggttcttgtaacactagatgggttaaagtcatacttttgacttctattatttatgtgattttatgtgatcttggccagtcagcctttttttggtaaaaggggaatgataatatctctcaagagtattgcaagattcaaatgaaattaaatgtgttgaaagcttctgtaagaaatgtacacagtacacagaagaatctccatttttataatttctcaattttccctttacattttcattcttactgtcatctgtctctcactgatgctgctgcttctcatgtagccccccaagtgcagactagttctcaccctcagcgctctaaccactgcctctagaagtagaataagtgtcctcttgcagaatacttctacttccttctcctcaaacccctccagcttggaatctcataccatttgattatattgatcactctcccaatgtttagtcactttccctcattctttgaagtctttacaacctgacttactgccattattttgatatctcatttaaattacttatcttctttgacatttgacctcgtcatttccaacgtacttgctatcttcagtatctagctattcaatctcatgatctcagctcaaaccatgttattactcctaattgcaaatttttacaatctaacttttaagtttcctgccttctgaacattaacttctatctttctagttcattccatttactacaacttcaaaaatactgtgactcatcctggatctacaatctcatacaatatacaatacagtccttatacaattctcaatccaataatctccacacatcctttacttctcagcaaacctaccttcaaaacatttaaataatttttactactgctgttatccacccaggcctagccaacatcatgtctcatctgaatttttatcccccttcctgcttctgcattagccctcaccttcagtctattctcaatacccaagcaagaatataacataatatcatagagatcatgccactctgctcactcacttttaaggacttctaattccactctcagtcattattgtacagattatacagctctactcatgctccccaccaggcacacctctttgatcacagccctgttgctcttccccttgtgcctctgttccatctttactgcacccaacacttcctggtgctctttgggcagcctgggaattgtctctgtgttagtccattcgagcagctataacaaaataccatagactaagtagcttataaatgacagaaatttatttttcacaattctggaagctaagtcccagatcaaagtgctgacatattccgtatatgatgaggccctatttcctagttcatagacccatcttattcttcatatggtggagtcatcatatggtggaagggacaaaccaatcccctcaggcatcctttataaaggcaccaatctccttcatgaaggctctgtattcatgacataatcaccttccaaagaccttaacttttaatagtatcatactggaattagacttcaacgtatgaatttgggggggttgtcaacattcagaccatagcactgtcacgttagatgctttgtacatggtttctctgactgaaaacacctgtcttcaaattcccccctggattgtttccttacctcctggattagttccttctcatgccgctaataaaaacatatcctagactgggtaatttataaaggaaagaagtttaattgagtcacagttctgcacagctggtgagacctcaggaaacttacaatcatggtggaaggggaagcaatacatccttcttcacatggtggcagcaaggagaagtgccaagcaaaatgggggaaaaaaccctgataaaaccctcagagaacatgagaactcactcatatcacaagaacagcagcatgggggtaactgcccccatgattcaattgtctcccaccaggtccctcccatgacacattaagggattacgggaactacaattcaagctttagatttagtgggggacccagtcaaaccacatcaccttcttcaagtctttcactcaaatgctactgtctctgtcatgccttccttatttccctacttaaaattgtatctccttctcgtgttctttatttgctttgtctgctttactttcctccatagcacttagcaacacttaacatattatatagtttaattttttatgttattatatatctccttccaagagaatgtaagctccaaaaaggcatatatttttttctttcctttttttcacaggaaaaaaggaaaggccctgtgttatatccacagggcctacaacagaatgtggtacaaggtaggagcttaatgtgaatgaatgaatgttagtcttattaccttttaagtttacctaattttctaattttctacattttctaccttcctccgtcctttccaccttcctacctcctttgggatgtgcatacagaaagcagcaacattaaggtaagaaagtttaacctttggattaatattaaaaccttgagacagttttgcttttctgttgcctttagcaaaaccacattcctgctgctgtcagttatgacgcactgagaaatcttcagagacctaaactttttccacaagatgactggagaaaaataaatcaccaaatatcataaagatacttgcatgttttgtaagtgattaatgactgctttctcataacagtaaaaactattttgttttgtatgagaggatttttcactctaacttttaaaaaaatcattacatacaaatatatcacatcaaacccaaaagccattgctagcacactggttcctgtcttaatattaagtatgagacaaaaggcctttatcttccagaaagttgtttataacatgccaaatatgtgaacacccaatagtcaaaggacattatctctgtgatgcaattttgaaagttggtaaaataattttttatcaatttcatcctacaagcacataatttaaaccattcttttaaagtggattttagaagattggaagttttagaagtcagtccctccacaaaaactgccattaaactgcaaaaaataagaattaacctttttggaactctggatcctaatcagataaataacaaccattagtagagtgcttgatgctattggtctttagtaagaaagtggctgcatgcacacgccagataacatcactcattcttattcacaagagtcaaaaagtgaaaacaaacctgtatgtgtggataaacaaaatgtggcatgtacatacaagggaatattatttagccataaaaagggaatgatgttctgatacatgtttacaacatggataaaccttgaaaacattatgctaaataaaataagccagacacaaaaggacaaacagtatatgattctacttatatgaaagatcatgaatagtcaaattcatgtagagggaatgcagattgcatgtttccagagcatggaggctggggcaaggggaatgaagaattagtgcttaatggtacagaacttctgtttgatgtgatacaaaagttatgaaaacagtgttaattatacaacattgtgaatgtattcaatatcactgagttttagaattgaaaatgattaaatggtaccttttatgttatgtatatttaccactgggtaataaaattgtattaatgtaggtgaggcaattttaacagttgtaccactctggaggaggatatgataatgaaggaggccatgcatgtggaggcaggatatattacatatataatatatatttataatatatataattatatatatattatatatacacattatgtcagggtgtgtgtatatatatattttatatatataaaaaaacatacaccctgcctccacatacatgtaagacatatatagtaatatatggtatattatcatatataatatatataactatatatatatatatatggtaaatctctatcttcctcttaatttttctgtgaaactgaaactgccctaaaaaattcaagtcctacaaaaatgaaagtgaattaaagtactttttctggaacaaataaacttagcataaatagttaaaatattaagagttgtaattaagggaaatttccgctcaatgtgacttcaacagtttaaaaaacgtattactacaataagaccacggagagaggaattgggagacccagaattgattgggtcagaaattgaaaatgatattatcagtgacccaggtttgaatgtctctcttcacagcattgacttcactaatggatgtgacctggttggcagcagtagcttggacaacatgcttgtttgcagtgggtggtagagagaggcaggttttgctttcccagaaaccctgaaaaaggtcatcaaacctaaatttccttagccttcttccatgagcaaatcactagcagatgattgctagcaaggtgttactattacaatgaacccctaagtatcatagaaagagttagtttggggaaatatcctctccaccacaatcttagtcatttaagtcaatttaacaatatattgaaatatttttcttagaagtttaaagttccattaaagagtaacgattacagaaattataggtagcctttagttccacaagtgacatctcaagaggaagatgattcatcaatttcaaactttccttgcaagtaatactggatgaaaattaacttggcaaacataattaataatcatgggttattaattacttccgcaaggtgggtgtgctgattttaaaaggcttgaataaaacataaatttccttaatttgatactgtaaatggagtaatttggtgatgtaaatggaaatatttaagtgatttttgcgtcagatcttacaacttaaaatatttttctaaaattagtttttgtaccatctctccagcatgttccagcctatatcagtcagtccaggcttctataacaaaatattatggactgaatggcttacacaacagacatttcttacaattgtagaagctggaaagtgcaagattaaggtactagcaaatttgtttcctggtaagggtcttcttcccggtttgctgtatcctcaaacagcagatagagaaagagagagagagagcactctatagactctcttcctgttcttataaggacactaattccattgaagagggccctacactcatgactttgtctaaacctaattaattctcaaaggcctcacttcccaatactgtcacattgtggggcagggctttaacatatgaaatttgaaggaaaaggaatattcagtctagaacaaagccccataaatttcaaaaagctgtgggacaggagggaatggggatggtattcaatagtaccacatccaagcaagtcttgtgtggttaaaacaaatcaatacagtaacatgaaattttacacagaaacctatctaattataaattgtatgcttaccataatcaacactgttatacattgttttaaaaatacttaataatgttttttgtttaaccaaataatagaggcattaactagtttcccagtgctgccaaaagaaattgctacaaaatttgtggcttaaaatagtaaaacaaacaaacaaacaaacaaaaaattctctctcaattataggaggccagaagaccaaaatcaaggtggaggcagaggcatacttcctctgatgcctctagggaagaatcctttcttgcctcttctagcttctggtggctcctggcactccttggcttgtgacagcataactctaacctttgtctctatcttcacatgaccttgcttgtgtttctgtgtcccaactacccatgactcactctaaattcagatgatctcaccctgagttctttaactttattatatctgtaaagctcctatttcaaaataaggtgacatttacaggtactggaatgggagagggtctaggacacagacactcccttatgaggatactacatgacccattacaaggcacaaagtaatcaccataggcaaaccgctagtgagagctcactccagttcggaatatattcatgtttctatgtaagagaaaaattcatccttgcttcagttcatcttggcatcagtacaagggtgggattcagagacatataagtgtggaataccagatcccaccacacttaaaaagctggcatactaagttcataaacaatgtagagtgtgaagttgagttgaaaatgcttatgccatacagtttatgtatcttataatagccttaatcacacttccagtaatgttctccaccactggatgctaaaaaaataaagttagttaaagaattagatagtataaaaaatatatatacctctttgagtggaaaaatgctgtcagcacattttgttattttattccattgtataaagtctcactagtgccctcttcataaatgtattgaaggtttggctaaattgtatcaaatttgtgattaaatacaaatgtgaatactataaaatattacaaaggacaatctgtatactatgctatgccagttttacaattttacaatgacttacagatgccataaatatttactttaagggagtaaaataagttataaaatcatatttaaggacacctaaatccttgaataagtttaaaatggtattattatttacatatgaagtcagctgactattgaaagcttatttttcaataacagaaatatatgcattatctaaaacacatattccaatattttcaagaaacaaaatactgaattaaatcatctgtatttaaatgtttatctattttcgttataaatgtccatgaaaatgcttaaaattggtttatttgatctaaaaagttaatatgcaatttttatttttaatatatcatttttcccatttattcttttctaaataacacgttcatccaaagtagatgactgaagaaacaaaatgctgttttctttatgaacttgtaatacatttcaaaaataattaagatattgttcaaggtgttgaagtgtacaatataacaaattgcatttgcagttgaatagtagcagagtagaagctgaaaaaataaatcatgtatcaaagtagcttaaaacagatgatagcagagcaaagagtttcctgccaacgccctctaaacatcggttcttttaggcttttgtgctggtattaggtttcagttatagacaagacatatatatctgaccttttcctttccttttctacaccttggagtcaaagtctcctataaaaggacatttgcagcaagtattttcagctggagtaggaggaaagggcaggagtaggagagcgttatgatcacctcttgccaaagcagtttcacttgatttgcaactggtgtttggtaaagaattttgctatgcaaaaatagtgtcttaattggattattttaagacaaagtatgcatttttcatgtcgtactagtattttattaataaggctagggaaacctactaaatccctatactaaagtgaatttgattctctccatagaaacttaaatcctcagggtgatacaactcagtccttctactgcagcagctcttttataaatgcctcccaaagctccaagaaggaacaaagaatgtgaccagtaagctcacaccatgagtctatattgcagaatatagactttgttcaacaaaactgcagatgctctgttgaatccactggagattgtcctgatactaaggacaagtatgtaagttaatgattttattaattttaacatttttaaatgttttcctttggggaattctaatttatatatcaatattcaggtaatatttgctgaaaacacaaactctgagaatcaaaatgatctgcattcacattctcattttctattataacatagagacaactactttattatctttttagaaactttcgcaactactttagtttcttcctaattttataaattaatctatctcaaaaaactttgctcaaaacagttagtaatagctatcaacttcagaaaaagtgaaactttaggccgggcggggtggctcacgcctgtaatcccagcactttgggaggctgaggcaggcggatcacgaggtcaggtgatcgagaccatcctggctaacatggtgaaaccccatctctactaaaaatacaaaaaataaccctgtctctacaaaaaattagcctggcgtggtggcgggcgcctgtagtcccagctactcgggaggctgaggcagcagaatggcgtgaacccgggaggcggagcttgcagtgagctgagatcgcgccactgcagtccggcctgggcgaaagagcgagactccgtctcaaaaaaaaaaaaagaaaaagaaaagaaaaagaaaaagaaaaaaagaaagaaaaaaaactttaaagataacttttagaaggaaaatgaaatacagaaataatacatctcatttacacttaattaaaaataatatgaattgtcactatttcctatgaaaacatctcatgccaagttcttttattaagcttggattttaaatgttatatttgagttgaaactggtagaatcttagtaaaactataacaataagaaatttttatattatatatgtaatatacaataatcacatttaattccatttgttagtctattctgattctttagcaggttgattcataatttaccaacttggatcagaaatattttctattcttagcttttgctgtcagcagagataataataatatagagcctgaacaacaaaggattgtgtattgtttcaatttaattaaagttgattcgctgctttaagagagactcacattttatattttatattttttaattaaaaagagaatgtagatatttgcttttccaaatttcccataagataagaaaaacatattttttcttaattacacccttgctaagtcacgctagctgcctgaccttggacaaaattcttaacctctttgtgtctcattttcagtaactgtgaattaaagataataactgtagtatatttctcaagggattattgtgggaattaaataaaataatcctctaaaatgcttagtacagattctggaacataataagcagaaaaaattaataacaattattatttttatttactgtattatgtgacatactttttctttatgaccttcaggagaatttctactcatcttaaaaatgtatatagatattgatctgcagagaaatatatctgttatttcaaggtctgtggattacataatggtcaactctgattgatttactgattaaacaaaattttaaaacaaaaataaaaatattgcagctatgttggttttaaccattctaaactctgatgaaatttgctttctgtttggtttgtgactaggaagataaacattatttattaggaataaaaatttctggtgtctaaaaaatttcaagaggaaaactgttagattctattacaattaaatctgttaagatttaattgcaaatatgtaaataatgcaaatatatcttagggcacaatttttgttctcattaacttacccattttacattttgagaacagtaatagatgaaatacttgtcaaagagaagatctaagatggtttaaagaaaatattaaatgaaatcaaacttacttgtcaagctccatagcacaacttacaagtcataaatcacactctgtatgacagctacggaagggatctgggtagtaaaacaaaatgatggattttatctttcctgtttttgagttgtttttttaagaaaatccttttcagtagatttgttaacagtacataatgaaaatcctataggcataggccccccaaaaaatcacaaggtatacaacacttgtgtcatgcatcacccagaaaaagaatcacatacaatcccacagctctgaaatacaggaatccatgattcttgaatgcaaacacaacctacacagcctctctgtttccaaagacatgcactgaacctcccacatctcccagaatacaaaatacagaagccacataaactcaaatacacaaagaaccacaaactatttttatcaaatacatataagtccacctcacgaactctgagaacacacatatgagtggcaacaccaaattctgcgagtatttcacttcacaacagacacagaggaccactaagtcttaatatacccaaaacccctcatatacacactcgcaaactacccatgaatacacaccccaccctcccagataaaacccatacaatgcaaaaaaaaccccacaaaaacaccaataatactctaatatacgcacacaactttcatatacccatgggcacataaaaactcacaaaaatatccccaatccctgagtgtataaatcccccgaaacactatccaatcaatatgctgcatctccagaatacaacctcctcacctcatcccctaaacatgcccaaacacatgtacgaacatcctagcattctccaaagaaatacactttaaatactaacaatcccgtattctataaatagacttagataattcgtctatctgctgataaatatacacacaaaccagcatatacacccaagatgcatggaaatatctccagcatatcatttataaatacccataaaaacacttcccaatcccaaattatcccaatctagtatgaaccagctcccacattgccaagtactaaccaataaccatatcacatacctctaatacatataaattcaactctcccactctcctgtataaaaagagaaccccatctctctatcagacacacacatactaaattcccagaatatataaccctaataaccacttactgcaaaacagaagcacatagctccacaaaaccttcatctaaactgccacgcccttaaatgcacacacaaactcaatactcatgtagttgtctacatgccctaaatatacccgtgattaactaacacgccacaaatatgcaaacatgccacctcatatccccaaatacacatacagttccacaatactgcccagcccagttatgaccttctttaatctgcaatctccacacagacacaaccaacccacacacgtgaatacatattagattctcaccaattaaatacatatcaaattccaaactaagaattcatataaacacattttcacatacacaaaaccacccccacaaatctcacaccctccaaaatccaaaataaatcttcctgacattctcaagaacacactaacccaaccacccaagataacacacgtgtgtgcagtaaattttagatacatgtgtagcctacaatttacaaataatataccactactttttatttgtaaattccacataagtaagcgattctcatggaagcttttcttgactttggccacactcttgcatccacaaccaacttgtgctaccaagtgaacaaactatgactaaaggcctgttcttccactttgcagctgctcctatcagtgacaaatcagcgtattagaacatgtatgctggctgatcattctgatcaagtcaacaagcttcacaacttactcaatgaggtcgtccgtgagaacttcactgttttaccaggacaggagctacttctttgctgaactgcatcacggtttcaactgctgaggttttcttcaagcttttgcattgtttggaatgtgaaaggcacggctgagacacacttcggcattcccactgcattgttacacctcccccatcacttcaggtccaggtgagcaagggaaagaagcgcggcctgggcgtcccgcagggcccccgctaggaaagctatgaacgctcccgccttgagcgcagccacaggcctgctctgatcacaatgtggggtcgccccgcggacactggtgaccagtgggagcatgaccaggaggtgattaccttctgatcacccttggctttatttttaggtaacaccaaggacgccatgatggcacatgcctgtggtcccagctaccccggaggctgaggcaggagaattgcttgaaccgcggaggcagaggttgcagtgagccgagatcacgccactgcactccaacctgggtgacagagtgagactccttaaaaataaataaataaataataaataaacaaataaataatttaaaaaagtcattgctttatttttaaaaaagtaatagtttcaaaatgtatacatgtaaaatctaactgggaatactttgtacctacttgtagcccaagattaagtttattctcaattactaggaggtttgcacaatagagtacatatttaatctgtatgactaaaagcctcattgtcaatgtgactgtgtcatcattatcacatttgtgaatctcctgattataactttcacagatggtctatctacagggttctgggataagaaacttgctgtctgtctacagaggaagctgttttcacttccagatagttctgaatatttgaaagtacttgctgattcagagtcaaattatgtcttgctgtaacatccacaatttctgaacttacatttgagataaaccaagattagactaaaccatgccttcaagtgacagactctcaaaaatgtgatgcattttttttcaaaaaaaactgcacgtccaggatactctacctggagaaaaacatagctctcattaaccttgtccagacattaaacttataagagaaaatcattattttccttgtagccaaattattccgctaaattgtttttaggcaggattaataaacctttactgtaaagggaaagaggctaagatcttaggttttgtgggccatataatctctatacaactgttcaactctgctgttgcagtgagaaagcatttatagacgatacacaaatgaatgagtgtgtccatgctgcaataaaactttatttacaaaaccagtctattggctggatatggcttgcaggccatactttgccaacccttggtttacagcctggctagctaaacactgcttgttgtagtaaaatcttgctttttaaaacatatgtctctcatcctagcattgtcattacatgtgtgtggtttattgttgaatatgtaatatttaaggatctttcctatttagttttattgactaaaagctgtttcataattataatacacagacatctatataggtttttattttatcattcaacctattagctaatccttagagttgtttcaattttcatgtgtttgacagatgaacatgtctaaaacactgatgaaaatgttaccagaatataaacaaaaatgaatttttccggttaaaaccattttacttgttagtaatatgtaactattaaccattaaataatttaccaaattattccattacgtaatccatattgctccttcttgtccacaagaatatagtaaggtacattatcaaatacatacctctgactttagtgggcatttaatgtattattagaggatcccaatatctgtctttcttaagaaaattaaactcatccctagtgattatacactttcttcatctaacactataatattaataacatttgaaaaagtaatgtcaaataattaacactagatttacagagtatttttagacagttttctaaaattatctgaaaaatttggccagaatcagtgtaaaattcacatctgagcttatggaagccaactttattccactctaaaagtacaacattttatagttttaattttatcttttaaaatgttttaacctaaaggtagtggaagacgttactaaaggaagcttaggtagtaacgtatttgtcgtctcagttaacacaaagaccatagatggggcagatctgcaggatgcaaaaactttcttttttctcacctcatagtagccatatggctactgcaattctctggtttcatgtgcttacaaaatgtcctttagttaaaaacaaaaagaaagagaaagagagaaagaaagaaagagaaagaagaaggaaaaaagatagaggaaaaataatttcttcatgtgtctatttaaattaacaaagacgtgaattgtcccagacctccctgtgatgattaatttcatgtgtcagttttactgggctaagggttgcccacatggctgataaaacattatttctgagtatgtctgtgtttccagagaaattagcatttgaataggtaggctgagtgaagaggatcatcctcaccaatatctatgggcatccttcaatctcttcagagcccaaataaaacaaaaaggcagaggaagggtgaatttaatctgtcttcttgagctgggacatccatcttctcttatcctccaatattggaacacctggtctatgttggtaggagtgtaaattagttcatcataaccttgttggcactagggaccagtttcatggaagacagttttttcatggaccgtggtgtagggaagatggttttgggatgattcaagcacactacatttatttatttatttatattattattatttttgagatgaaatctcactcttgtcacccaggctggagtgcagtggcgcaatctaggctcactgcaatctccgcctcccaggttcaagcaattctcctgcctcagcctcccaagtaactgggattacaggcacctgccaccacacctggctaagttttgtattttcagtagagatggggtttcaccacgttggctaggctggtctcaaactcctgacctcaggtgatccacctgccttggtcttccaaagtgctgggattacaagtgtgagcaaccatgcccggcacaggcacattacatttattgtgcactttatttctattattattacattgtaatatataataattatacacctcaccataatgtagaatcagtgggaaccctgagcttgtttttctgcaactagaggtcccatctgggaatgatgggagacagtgacagatgcacacactgcagggggattgcattagatcatcagacatcagattctcataaggagcgtgcagcctagacccttcacatgttcagttcacattaagattggtgctcctatgagaatctaataccaccattgatctgacagcaggcaaagctcaggcagtaatgcaagtgatggggaatagctgtaaattcagatcaagcttcgcttgcttactcactgctcctactgctgtgtggcccagttcctcaccaggccatggacctagtccatggcccacagggttggggaccccgatctaatgtgacaactctggaaatcagattctataccccctatttgttgttgctgttgttgctgctgttattgttgttcagtgtctaatgagctttctgaaataattttgtagtctgggactactcttcaacactcagccaggcagtttacatctctgccttagccttcacttcctgcttgcccagagcctcaaggccagtcagaggtgagagctttgagccttcccaggtctttactgaacatgtacgcaggcctacacttgggagtagcctcatagatttctaggaatcattctgttggaattttcaaagcccttatggacatctcattctcctgttttacttttaaagctttttagttagcctattgtctgcccaaaatgttatctacaacctcatacaggcaccaacttgaataacggcctttaaatgtttttgacaaatgccattaaggaaaaggctttttcgttaagtgagctcttaggacagaaaaagacatcctggcagtgggatgtttctgaaaaccaccagccaagtcaaatgacagttctctgggaatgaggctttgaaggaaatccagccccattctgtctttccagtggctgccaggctattggtcttcactgtaattatgggctgttaattttcaaggctgcagtggagccagcgaggagaggatgagaatagaatagggcaagttaaaaataccatactgcttgctgttcttaatgagatttttcattttatttatttgtgtgtgtgtatatatgtacacacatacacacacacacacacacacacactgaatggaaaataaatcttggggccccaaaatcactaagctaaagggaaaagtcaagctggaaaagggttagggcaaacctgcctccaattctattcaaagtcatccctccattcactgagataaatgcatatcggattgcctcctttggaaaggctaatcagaaactcagaagaatgccacttgtcactcacctacctgtgacctggcagccttctcactgcttgtgctgtcccacctttcttggcagaaccaatgtatatcttccatatattgattgatgtctcatgtctccctaaaatgtataaaaccaagctgtgccctgactaccttgggcacgtgtcatcaggacctcctgaggctgtgtcacaggtgtgcctcctcaaccttggcaaaataaacttcctaaattaactgagacccttctcagatattcaaggctcacattttggcaaccatgaagggattctgggtggaggctcccctgacctttgacaaatctcctatcagtgctcggtaccagcttgaactatctttatggctcaaaccaatagaacaatttgccgagacaggcctggaagcaccccctccagagaatcactgatctttcaaaacttggtcaagatctaaagtttattttgcagtacaactccttttttttggagttttactatcttccaacgcaagaaaggcaagtttttcctgctttgatgacgatgaaatgcaggtaactcctttatggagtttgagcttgcttccaacggggaagacaaatgtgagtttcttccttcttctagtaagggaggagaccacccctcatatcgtcttatgcccaatttttgcctccaaagaaagaagtaaaaactaaaaggcagaaatgaaatccacaggcagacagcctggcgccgcaccctgggcttggtagttaaagatcgacccctgacctaatcggttatgttatctatagattacaggcattgtatagaaatgcactgtgaaaatccctatcgtgttttgttccaatctaattactggtgcatgcagcccccagtcacataccccctgcttgctcaatcaatcatgaccctctcacacgcacctcttagagttgtgagcccttaaaagggacaagaattgctcacttggggagctcggctcttgagacaggagtcttgccgatgcccccggccaaataaaccccttccttctttaattcggtgtctgaggagttttgtctgcagctcgtcctgctacactaggatggtaaagagcagtcttcagcctgagacccatcccttacctaaggatgggtaactaaactgggggttgtcttggctaaagttaagattaacaaccagctggttgtaatttctctttaccattagagcactcagtagttggataagttgtgccatctttgttttgcttaattgtttttgttgttgttgtttgtttgtttctgtttttgttgttgtttcagtctttttgccattgggattgatcaactctatccgacttgatcaaatccaaaggaaacttccaaattatggggaacaagacctctgaagtggctaaatttccacactgtggtgggggagaaaaacagccaaaaaaggggaaaaaaaaaaacagggaagattttttactttgactacttaaggggctttatttacataacaaggccacctttttgctagccaggccaaactgaaagagcaatggctgtcactccatactgcagttccatagctaagggctctggcttctttttttccaccacgacagcttgggtgtggttcctaaatcaagccattttcggtttgatacttggtacttctgaaatagcagcaatttgttctagctgaattatggtaatgagattttaaaagatttttttaaaggagctcaatgattaaaagtcagcttaactaaaagctaacatccaagatgtgtgtgtgtatgtgtttgtgcatgtgtgtgtgtgtgtgtgtgtgtatgtgtgtgtgtttgtattgaaaaggccttcacatatttttttttttctcctaggaccttgtctctcttttttttttttttagttaaagatttttttttctcagttgactgagttctgttttttgttttgttttgttttgttttatttacttctgctgcctctcctttctcttgcaccctctgctgcttgagggacctaaactattatagtttataatagcctggctttccttcaagaaagcagagaaggcaccagactcctttttggggagaaacctgtttttccttatgaaaccccaagagtgtaagcagataagttcatctcagctcttaaattgcctgcttttgtattgtgttacctgacttattgactaaaagagttgttgcaccaaagcctcctctggtttttaaggaagagtgtagtttacacattagaagtgtcttcgtttaaaaaaaaattttaagtgcactgtaaaagcatcacatggtctagcctcataataattctcccttttgggagattcaggattcagtgtgggctctgcccagagctcagagatctagtcaaaagacaggtatttcctacataaataaaattggtctcttcatataatcctatgacagatttcttttttttttttttttttctgagacagagttttcgctcttgttgcccaggctggagtgcagtggcgcagtttcggctcactgcaacctccacctcccgggttcaagtgattcttctgccttagtctcctgagtagctgggactacaggtgcccaccaccacacctggctaatttttgtatttttagtagagacggggtttcaccatgttgggcaggatggtcttgatctcctgaccccaagatccgcctgcctcggcctcccaaagtgctgggattacaggcatgagccaccgtgcccggctatcctatgatagatatctgtaactttatgtttgatttggcatccctcttttgttttgttttgttttgtttgagacggaggctctctctgtcacccagcctggagtgcagtgacacaatctcggctcactgaaacctctgcctcccaggttcaagcgattctcccacctcagcctcccaagtagctggaattacaggcatatgccaccacacctggctaatttttgtatttttagtagaaacgggttttcaccatgttggccagggtggtcttgaactcctgacctcagatgatctgcccgcctcgacctcctaaagtgctgggattacaggtctgagccactgcccctggtgtagtacatggttttactgcatgtgactagtttacatgcaactagccatgcaagttcagtaacccaaggcggtctataccctgttcaacaagaaccatctactaatgacacttctggaagtctgggcaatgtcaacttgctgtaaaagttcccaaatgctctcaattatcatatgataacaaaggtctcaaatcagtaaattttgagtggccctttactaggaataatcttgaataagctagtactgccctccacaaccacaattaaaaatatatcggtattggttttctcttcagttcaagaatcatgtaaatatgtaatgtagaaaatgaggatttcccatattcccacagaatcacaaagatgatcactggtaatatgcgtgctacatatatgataccaggtttattctactctttttttttttttgagacagagtctcactctgtcgcccaggctaaagtccagtgctacgatctcagctcactgcatcctctgcctcctaggttcaagcaactctcccacctcagcctcccaagtggccggaattacaggcacctgccaccatgcccacccagctaatttttttatatttttagtagagacgaggtttcactaagtagaccaagttggtcttgaactcctgacctctggtgatccacccacctcggcctcccaaaatgctgggattacgagcatgagccaccatgcctggccatttttttgtacttttatacaattatatgcttgctttataaaaatgaacttattctacatatacatgttattacattattaggacatgttcccaaatgacatattacattttcatcattcttttttaaaatattttttcgtgagacagtgtcttgctctgttgcccaggctggagtgcagtggcctaatcacaggtcactgcagcctgaaactcctgggttcaagggatcctcctctctcggcctcctgagtagcccagctaagtttaaaaaaaatttttttttggcctggcatggtggctcacgcccataatctcagcactttggaaggccaaggcgggcagatcacttggggtcaggagtttgagaccatcctggccaacatggtgaaacaccgtctctactaaaaatacaaaaattagctgggcgtggtggcaggtgcctgtaatcccagttacttgagaggctgaggcaggagaatcgcttgagcccaggaggtggagggtgcagtgagtcgagatcatgccactgcactctagcctgggtgacagagcaagaccctgtctcaaaaataaataaataaataattaaatatatatatatatttaattatatatatatatatatggagagacaggtctcactatgttgcccaagctggttttgaactcctggactcaagcaatcttcccatctgggttcccaaagtgttgggattagaggtgtgagccaccatgcccagacattttcatcatcctttttttttgagacggagttttgctcttgttgcccaggctggagtgcaatgtcacgatcccggctcactgcaacatccacctcccaggttcaagtgactctcctgcctcagcctcctgagtagctgggattacaggcatgagccatcacgcccagctaattttgtatttttagaggacacagggtttctccactgtttttactagaccttgatcacatcaaaaagattgtgtctcttccatttattgtgcagcttgtacacaattgacacaatgaggagctcagcaaaggacgcagagtgacagcatcctcccttcagtggaatggccatgtctagacacctcttaatcactcccgagaagtagggatgggttcggtgtatgagaataagaaacggagcctccagggttgagacaatttgcccaaaacacacctcttgtgggaagtacagttgcgatcccccaggtctcttgggcttgcaggttcctgctctcccgtgggcccccaggagatgttggctgccaagaggaggaggaatcctcctgggcagaggttaacttttgccactccaggatttgcccaccctggggtccctgccgggaatgttcccccagcaccaccctccccatgccgcctcctaactggctgtgtccttcccaccattcagcaaacacatcctacatccaggaccagccccttcatctcaggaaggctgccatgggactcccagaacccccatggctcctggagccctgagggaatcacatcttgggtggggagtgatttgttttctcatccagtgcaaccttggaggtaacagacaagaatgtcctgtgatgcgaagcacttattgtcctgacctctggtccagtgcccttcgctctaagcacatagcatccccaggctgttcctggaggtgtgggctggggtttgtagggactagctggaccagctgggccaggggaggcagccatgcccggggcacatagccactgcccagagctgcccccagagctgggagccatcttgcacatggtgctgtgagatgccctccagagaggaagatggaagctgtctccgtgccccgggactgatgaagggcccattccaggcctttgggcacccgggctcgctacccttctgggagccctgtcctgtgggccaggacaaaggtgccctcactggtggcattctcagaagctcagccactccccacacatgcacataggggcgtgcccacaccaagccacgtgtgggtgtctggggacaatgagtcttgggggagggggtgggtcccttccagaagggtctggccaaagtccagttatgaaggtgagctgagatgggctccctcaaaggagccatagtgtggggagccccgggcagagcccagagagaaatgccagccccgagaccgagacacgctccaaggagtgctgccaagagcagtagacacagccgctgaggcccacggggcacagtgaggctgtgggagagggtggcccctctgtggccatttccctgcctgtgctcacatcccctcctcaggcctgtctcaccagctcttgcagcccatgacccacattctgtctgactctccttcctctcctggctacagggatccccagtgcccctcaccattccttctggtctctcctctgcctcccggaactgttccccaggactctctcctgggtcagcccttcctcccactccacatcagtggttccgaaccccggatgcctttgggatcagctgggtgcattttaaatccttccagcccagagccctgaggcccaagtcacccccgcctgctcctgtggcaccccttggatcagccaaccattttatcatcatccatcacgtcccctgtcaccaagagcctctggcatgttctgttgtccccacgcccacactggcacccctcatccaccaacctgtgcccacgtcctgccttgagcctgtttcccctcctgagtggtgtttcctcactccaagtgggcactgaggcagctggcagacctggctgtgagcttctgtcccttccagaaggatcctcccctccagattacccagtcaagcttgaccccatggtgccactgagacagaccaaaagagggtattgaagccacacagtcccctgagccccactgagctgcaccagctttggagctggagacagcccgggagactgagcactgagtgctaggtcaccatggagaaatcattgtaaccttccctttctcccactcttgagggccctgggggaacacagcgcacaaggtgagtggtggaagaggcatgtgcttgggtgcttggcacctagccggggttcatttctgtgggttcccaagatcccagccacatgtcccactcctgcctcacaaagtgacaggaactccctgttctggaccctgagctgagtgtcagatgctgaccatggagaccctgactttgaggggagcacagactatcaacacagtcctgtgaacacagagagaagagtacaggaggatgctgtttggagcacaaagggtgtggtgtcgtctactctgggacctgggtgttggaggaggctgctgtgaagaaggaaccttccgctgggccctggagaatcacaagcatcataggagttagccaggtggaggttgggggtggaggcatggggtggacatggcgggaagtgaaagtgaggtaagggagaacttgagggcccttctgcactgacagggtgagtgcatgggacagggtgagtgtgcactggaatggagcgtgggtgcaagagacaaggcatgtgtgcacaggagggagcatgtgtgcatgagggtggagtgtgtgcacagggatgctgtgtgtgtacatgaggatggagtatgtgcagaaggatgaagcatgtgcacgcagggccagggcatacgtgcatggggtgtgtgtacctggggactgagcatggtgtccagcctgttcctcctaagtagtgggcaccagctgattcctcaatgaataaatgtcagccagaaagagaggagatgcacctacaggctcacagcaggagaagcataatgcattggtgagcgtgtttccacaggggacaaggagggtggcggaagaggcgtatgggtggggtgctgggtacctagccaggctgtgttctggtgagtgagcccaaagggtctgagatcagctgcaggcatcctcatctctgcatctggaccactggacctcagacatctcagggagctgttgagtaggcaattggagagaaacttctggaactcaagaggaggatgggggtggagccatggcctcaggcatcatcccaggggtaatagtgaagccacagatgtgcctgagagctgcccagagagaagccaaggccatccaaggcaaagagcagacactcagaaaaccaggggagcactccgctgggaaagacagggccaggggtttgcaagacacagcagagcgcaggctacgtctgaccagtggctggtgagattcacagacaggggccactttgggccactgcaggatgtggagggtgctgggcgtcaacgggttgccctggagggtaggagggaggcaaacagctcctgtgggcaacagcggtggggcaaggggctggggtggtggctgtactggaaggggtgagggccagaggacaaggagggagcactctgggagtcctggagaggagagtgtgaagacacaggagaaagagggaaaggagatcaggcaggaaagatgagggaggggagtgggagccagggcctgactggagactcgacttctgacttccgacttccgacttccgacctccaacttccgttaggaagtgaaacaaaggcgaaggccctctctgtcagggtactcagaggaaaggtcagggaaccagggcatgtgggagaagagtgggagtcctcccagtgttgtggggaaggtgtctgtttagctggaggtgagattctaggtccggtgtcggggaggtggtgagtgtggaggccgggagattagaattagtcattgtggtgcaaaagggaaattaacctacagaagctgtccagcgccagcgtgagtatcagtcagaggctttgagcaacccagtgctctagaggaggtaaagtgaaggcttccctggtctctgacatgaacttgttctgactccccttgtagaggcccaggaatgtgtcctgccttgtccacaggggaaggcctccaccctgctcagcctgcctggcagaaatgtcccccagccctcctggagccttagccccctgaatgtgccccacagcagacagctatcagattcctccacaggtgttcactctgtggccgggcaagtcagccaatttaaaccgtatatgtttgcctgtgtgtatatgtttatgtgcgtgtgctttgggatgtatgtttgcctgtgtgtcgatgtgcatgtgtgtgcgtattatgtatgtgtgtgtgtgtttgctgatgtgtgtgtgtttgtgattgcatatgtttgtatgtgtgcatgtgtgtgtgtgagtgtgcatgtgtcagctttgccgtctttccttcaacctctggctgctgcagatggtggagtgagctgaagatgctagagtgagctgaggctggtggagtaagctgaggctgatggagtgagctgaggatgctggagtgagctgaggatgctggagtgagctgaggatgctggagtgagctgaggatggtggggtaagctgaggatggtggagtaagctgaggctggtggaatgagctgaggatgctggagtgagctgaggatgctggggtgagctgaggatggtggagtgagctgaggatgctggagtgagctaaggatggtggagtgagctgaggctggtggaatgagctgaggctgttggagtgagctgaggatgctggagtgagctgaggatggtggagtgagctgaggatggtggagtgagctgaggctgttggagtgagctgaggatgctggggtgagctgaggatggtggggtgagctgaggatggtggagtgagctgaggctgttggaatgagctgaggatgctggggtgagctgaggatggtggggtgagctgaggatggtggagtgagctgaggatggtggggtgagctgaggatggtggagtgagctgaggatggtggagtgagctgaggctgttggaatgagctgaggatgctggggtgagctgaggatggtggggtgagctgaggatggtggagtgagctgaggatggtggggtgagctgaggatggtggggtgagctgaggatggtggggtgagctgaggatggtggagtgagctgaggatggtggggtgagctgaggatggtggagtgggctgaggatggtggggtgagctgagcatggtggagtgggctgaggatggtggagtgagctgccctgctagacactccttatctgctcccagcacacaacatcctgtttctggtttccatctcggtcagtggggctgcagggcagatgctgctcagatctgtctttggagttattccactttttgtcttgaactttctggttgtgtttcatttttcattaatgcattttagaacttcggtccttttaaaactctgcatttgttataattagctgttcttgtcatatagttttattcctttatctttttttgaacattttatacacccttatttcaatgttccttttagatcactctattctctttactctctgggctttgaatctccttgtttcttgtatctgctgcctctctttgggatacctgggagtttttcctctgacctcgtcttcagtaggaaatgattttccatgagaatcctggttcccctggatgaggacggtgtctcctggggagaatgtcctgtttggttttgctggagcctggcaggttctctcagttgcagatgggtgtaatgttagctcctcagctcagagtttctgcaccagctcaccgcagacttgggccctggtttcccacagatgcccagggcagggggccttcctctgtgctaggtgctgctccgtggtatttgttccacgagtctgcaaacattgttttgaagtcagtttgtaacatctgcctagtaaacaaaagtaacacttgtgtctcctggaaaaatggactgtcaccacccccttctcttcttcatcccagtcctcagggaggcccctgagccactgatgtctgaggccaccaaggcaggaagaccctggggagagggtaaatgggagatgcctctcagcccctgtgcctgctgtcccctgggccccagggtagagcttctgcagactttgttccttcccatttctgagacagcctgagctggggccaccctccccttcatggagtcccagctgtcaaacaaacacctccagggccatctgttctctgagcaagagttttcctcctgggatgcccccacccacccacagaagcagggatatagggaaggaaggaccaggatttctggttgcaataattgtatccgtgagtttgagactcccaggttacctttggacttatgagctgaactgctgggcattctggcctggatgtccctagagccccagaacctccacaaggatcatgagcagggggtcactgccccagaaccatgagggcacccacatggtctaccctggctcctcactcatcagaggaaatgacgagattccaaggtcccctccggtattgcaagctggcctgagccatagggtcctgtcccagcatggcatcaaatgcctggagctcatcctgcaggagcagccatggcggagcccccaggtgtgctgggcagggaggatgtgtggaatctcattcactctggacagctgtggcccccaaactacccataacgatgcagtccagccggaactggggccttttggcttcataacatgttggagtctttccccagagccccattgtcttttagaaattaccacttagagagggtagtgcttctgataaagacaggcatgcactgaattgtgtcctccccaaatttatatattaaagtcccaacccctggttcctcagaatgcagctgtactgtggttggagaggatttgtaaaggttaaattaaacaaagtcattagggtgggccctaatccagtacgactggtgtgcttataggaacagtttaggaaacagacatgcacagagggtaaagcatgggaggacacaggaggaaggtggctgactcggaggaaacgaccctccccacaccttgaccttggacttgcagcctgcagaattctgagaaaaaaatgtctgtttttttgtcacccagtgtgtgggactttgttttggccacctagtggactaatacaatggctttgctgttaacagcccagacccacgtttcctgcacataaggcatgggactcactcatcccctctgcccaggcccagccctggtctccgagctgagttcactgggtaggctgcaggcagcaggcaggagtggggcctgatggaacgggcgatgctgaggcagtgagggcggcagagggatgctcactggctcatgtggctcagcttcgtggaagcatcaggagcaggagtgaaagaagcaggtgacaggggccactcatggggagacagatgggcaggctcctccacatgctggagacaactttgggggcacctgctccacctgttgccacatcctcaaacttccccataccccatgctggatccagcagcagccctgattgtatggtatgaccttggtggtcagatcaggcatggacagcttgacccagactatgggatcagaatctctccccagcaacgtggccatggggtcatctgaacagaggatgagcaaccgcagacttcagggctactagcagccaagtacacagagaggcagaggtggggagaggggagcaggtgcagagggagagaaggggcagagctgaggccgcatggcccagggagcagggaaacctgaaggagaccccaagcaggggtcctgtgggctttccaatgtctggtcctgctgaggcctggctgcccttgtgatcatgagctggcaacctacagtcactacagccctgtccttctggtctcctcttgggtcctgcctctgcacagcctgtagccaggctcaggctgggatctcccatatggaccctaagacgggctttcctatacttcccatggaaattctccagctgatagaagaagtgaacactgatagaagatgaacagctgatagaagaagtgtgggggttttctcaagtggtctgtaaaatttttgcaaggtttgtggttcatctcaaagattcgtaatttcgaaatggaagtcttaatagttagggaaatttttcacataccccgaagggctcctctttctccagggttgggtcaaagtcttgtgtccagaagccccctggtcggcagtcctcttggcttcccctatcacccagtgtccagcctgcatgggcccttcagtcccaggggccatggtgaggctgggtccctgggcctggcaccatctagacaccccttggtggtccagtgatgtgcaagctacatctctaaccccctgacctctgccttctctacctccctgcccactccctcattcagagacactgagcgtcacctctcaggagtttccatcttaacgcaagatggaagagagtttcacttcaggccactgttgcccactgtatcttagtccatttgggctgctctaaagaaactaccacaaactgtatacttttcaaacaacaggaatttattttaaacagttctggagtctgggaagtccatatcaaggcagattgagtttctggtgagagtcagctctctggttcattgttagcatcttttggccaacaatgtctcctgtgttctcccacagtggaaggggtgaggcagccctctggggcctcttttataaagacactaattcaatccatgaggctccaccctggtaacctaatcatctccccatactcccacttcctaccatccctttgggtttaggatttcaacatatgaatctttaggggacactaactttcaggtcatagcatttggacttacaccattgcctcacccccgcccctctaattcttgggccttcggactcagactgagtcacaccactgacattcttctttctctagcttgcagatagcaaaccatgggacttctcggtctccataaccacatgagccaattcttaataataaatctcctcttacatatacatatacccgtatatatcctattggttctatttctctggctatccctggctaatacacactgcaagcacctgtgcaataccaagggcctggccatctgcttgaaatgtaaaatagaaaacacacccccccacacagagagagggagagagagagagagagagagaccctgtccagagccacccacccagtgcctgtccctagaccaaggcccagtccccttcacctgtctccatcataagcgtcaccagcctgtctgacaaactgcccagcaaagttattgacattggcctggccgcctggggatgcaaggccctgaacattgtagagaatgagatgccaggcctgatgcacatgtgggagctgtactcggcctccaagccactagagggcaaccacagtgccagctgcctgcacatgaccatggagatggccatccacattgggtccctcatcaccctgggtgccccagcagcaacatcttcctcaccctggaccatgtgttggctgccattgccaaggctggcattccagtttacacctggaagggcaaaagaacgcagagtacccatggtgcatcgagcagtcactgtaattcagggatgggctctcaacattattctggaggatgggggtgaccttgccaacctcttccacaccaagtactcacagctcttgctgggcatctgaggcacctccaaggagaccatgacgggtccacaacccacacaggatgatggtcaatgggatcctgaaggtgcctgccatcaatgtcaatgactccctcaccaagagtgagttcaacaagctctatggctgctgggagtccctcatagatggcatcaagtgggccacagtggtgatgattgccggcaaggtagcgatggtagcaggctatggcaatgtgggcaagggctgtgcccaggccctgtggggtttcggggcccacgtcatcatcaccaagatcgaccccatcaatgcactgcaggctgccatggagggctatgaggtgaccaccatggatgaagcctgtcaggagggcaacatctttatcaccaccacagcctgtgtcaacatcatccttggccggcactttgaacagatgaaggatgatgccattgtatgtaacactggacactttgaggtggagatcaatgtcaagtggctcagtgagaacccttggagaaggtggccatcaagccccaggtggccgggtactggatgaagaatgggcgccacaccatcctgctggctgagggtcggctggtcagcctgggttgtgccatgggccaccctggctttgtgatgagtgactcatcaaccaggtgactgcacagaatgagctgtgaatccacccagagaagtaccccattgaggttcatgtcctacccaagaagctggatgaggcagtggctgaagcccacctgggcaagctgatcatgaaattgaccaagctgactgagaaacaggcccagtacctggggcatctcccctgattgccccttcaaggctgatcactaccgctactgagagccaggcctgcatttcaccttccagctgctgttcttgcccaggccctgcctctccttcttaagagcgaatggcaccaactttgtgattggtttgtcagcatcccccatggactccccagggccgttcactcagtttttggcttctgctgcacccctcatactattccaagtgagtcaggggaactgagagtcccctcctcaagcctggtcatggtggaagtatgagggagacagccacagggaactgtgagctcaatggtcttggaactgctcactaagtcagtccttccttaacctggatgtcagcagtggagtcgcaaagcccacgtactttaccatctaggccttcacctggcctgtggacttataccctgtgcttggtttatggttcagtcattcctcagcccgtgacagatgagaaggaactgtattgaagggcaaggaggaactgtttcaattttcctgagagcttggcttaatgctggaccttctcttaaacctcgtaacaatgagattggtactttcagtccctgtttcacagggattagaatacactcttaagggacaactgagaaagaacagagaagtgacagccagaggttgagaggggccagaaaagcataaaagcaggcacagatcagccaccactttgtaacaagagggttcctatcacaaccttgggtcaaaaagagaataatttggcttataatgtttataatgttaaaagaaagcaggaaggtaggtaaataaaaatctcaatgccattaaaaaaagaaggaaagaaaaaagaaacagagagggagaacacaaaacggaatgaatgtttcaatagatatctgaccaggtatgcaaattacccagcccagcacaggcagaagcactaggcagtgcttgagacatggagttcccttctgcccctctgtctccctctacatgctgggcctactcagggaatcctggtgagagatggagttcccttctgcccctgtctctctctacatgctgagcctactcagggaattctggtgtttacagaaggggtcagaggaactgcatgaagaccacagctttgtgtagacacacaagcttcaacacaggcatgtagatgtgtggttgtatatgtgtgcatgcgaggagttttgcagtcatgcctggtgggagtctgggggaggctcctggcttcaaagagcccaagccattagcccaggcttggagacttgagctgagtgattggagggaggggctgagcagcaagctcaggaatagcccaggccggccaggaggacagtttacctaaccgtcagtggtgagggagcctcgccccagcccagagctgggtccactggccagccaggtggaggggttccttcaggctctagtgatgacctggcaggaagctggggacatgctctaggctgttagcctctgtgagaggcaggtggatacttcccccatatccccactcctggttgcagattctgcacttgcggacaggaaccgagtgcccagtacacttctgcagacagctgctctgcattgactcctgcttcctccacttaaaagttgtgggatgttaagcaagttgctataaattctcagacctgtactttcctaatctatcaaatgtgaagaaagcaagccaaggtcacaaaatattagtgagtctacaacaattcacccgcggtgatcagcagcacatacccaaggaggataaaagaaagttgataaaactccccggtgttctgatgtgacgtccccacctcctaggaccaagggtctagcacagagtagaagcttaggatgtatcaaggccccattgagctctgggagttctggctctgcccactttaatgataaatgatcagagtgctgcactaaggcagcttcaccattaagcagccatctgggagggcctggtggttcagctcccaactgcggaagggggcaacctggggaagtgcacagggctctggactagagccagaagactcagctgctaaagcccagcccagccctcctacactttcctacacttcaacccacctgatgcctcctctcttggaggctcgagcccctggtggtgggtgtggggtgggggatctaagggctcaccttgtcactaggcagtccctgtcccaatcacctccatgcctttttgctggggcttgtgggttgacagttgaagtttcaggaccccaggaaaagtgccttaaataacacattcctgcaaacggatagccatttattttcccattgattggagatggttgcggtagcacatcctatgtgggtctggttcctgccgttattctctccctcaccatggtgttccccagaggactccctaacaaaagaaacctcctacgtgtacattttcctctccagtctgtttctaagcccctgtgaggagttcagctaatacaggtgtgcagactgggtgtgcacatctgcctccaaaagtcccaccagggtcttgccatgaagggagccttccctggtaggttaggaaaaccagtaggagagctaaagctccagggtccttgccctcagtgattggtgccctagcggggactgggcactgtccacaaatctatccccaactccttcttggatgcacagctactaaattgtagcctcccctgcagctcagcgggctgtgtctgagctcatggcagtggcaggtgcacatgcctgtcacccagcctagccctgctccttctgtctggctgataagaagctgatctcaaaagaatgctcttgcctggcagagcttcccctgcatattgaggtccctgaatgaccaacggaggcctgcagtgcccctgggggcctggaccctctctgtgccatcccaggggtgagcagtgccctggcttcttgtgagcttccatgtggggctactcgttacctcacctgctctggctcattccagctctacaggggtgcttaacgtgacatccattggactctcagaaatgtgtgttcttatagttctggtctaaaataaggaataaaaattgcccaccgtgttcccttttgtacactttggttttgggcagctctgatgtgagacttgttttctgaaattatgctgcccctcccccgaggagggggcaatggaacagtggcagccaaggagtagaagtagttagttggcacctctcaggcatcaaaagagtgagtaaatactaacacttcaaacagatcctctaggagagcacgctgaaattcaccagagacatgatgggaatcagacagcagaggagagggaagcctgccgagctgggacccccatggagcggaaaggggctccctaacacagggaagaggtgagcaagtgagagaaccctgaaatttcacaactccaccatggaccttcacaatcctagtcacagggagccctctcattgcccccgggcctccagatgaacacagggagcctgctggagactgtgcagaggcactgctcaagcctacatggatcccacaggcttttcatccctgatctgcctggtgcagctgctgctgcctgccatggaggggaactgggcactttcgtgtgccccaaagacagatactgcagctgtggtaaggaggagtgggtagacaaggcttccctctgctgctcctctctgccaaacgggacttgcctgctttggtgacaggctgccagtgccaccgcccacccctgactgagcatgacagccacagctcactgttcccctgagaacccaacccccagaggctgcccattagcccgttccaccacaggcttgcctctgctgccccaggccaggaagggagcaggaaggtcaggcaccttcctgagctcctaacagcaaaatccagctttgggagagaagtgcaagtggaccatgagcccaacaactatcattgctcattgccccagctgaagattcctgccctcctgggtgaacggtgcacagcacagccaccctgctatgcctgaacattgcagctgtggcctggagcccttcggaaagcccagcccccacagtcctgtgatctgttctcaggctccaggggatcagcccacccctccctatcacagccagcacctgaactctgggctgactagatcctggtccagccacatcaggactcctacatgccatctagtgggtcactgagaggtgtgggagttggggaattacctagcccagtccaacatcgctggcacctgactaccctctggacctgagtttgggcccacccaagcagccaacactagccatgactcccacccacatggctgacaggcagagccattctccctctctccatggggtggcggcattaccacattggagaacaggcgagccatacaactgcctgcattgggctgagtgaagaatttccaccctgaagccactcctgcggagaggcacaggacaggcattttccacgtctctcagccacactgtggcctgcagatagaccacagtgtgcatctgaactgagacaccagccccagaacaggggtgtgatagggaagcagattgcattcctgcctatctagacgtggagccagtgcagccccctcatcccaccacagagacctctgtgcatgtcatcaggagctcccccagccacccctatcatggctggtgcctacgcttatcatttggggtatttgtgggaaagccagggttccagctctgcccagctgcaacctctcttccaccctcccaacctactcttagcaggaagctcagggaacctggcattctgctgtccagtccatcagctgaaacaatagagagcacctcagtgagcaaaggtcagatatacacccatgcgcttatgccacagccagtagttagtgagaatctctcaggcatcaaaatagtgagtaaatactaacacttcaaatagatcctttaagagagcatgctgaaattcaccagagacatgacaggaatcacagacagcagaggagagtaaagcctgcacagctgggacccccatggagcgaaaagaggttccctaacacagaagtgccccctactggcctgcaggttgaactgcacagcccaataaaaaacagaagtgcacagggctgcaggagaaaggccataacccctacagtgacaccctcaaggcggggggagggagagataacagagaaaatatcccacataaatgaaaataaatttgaacataagaagtgtcagctcctccagatgagaaggaaccagtgtaaaaattctagcaccatgaaagatctgaatgttgtgacaacatcaaataatcacactagctctccagcaatgagccccaacgaaaatgaaaaccccaaaattacagataaagaattaaatgtatggattgcagggaaggtaaatgagagccaagagaaagttgaaaactaacacaaagaaaccatgaaagcaaaccaggaaatgaaggaagagataaatacctttaaaacaacaacagaacttccggaaataaaaaatacacttaaagaatttcaaaatacagttaaaagctttaatgatccaagcagaagaaaaaattttcagatcttgaagactggtattttgttaacatagtcagacaaaaatatagaaaaatgaattttaaaaaagaacaaataaagatgggattttcaccaaacctataacttatagacattcctgagagaaaataagaaaaagtaagcaaagctggaaaacatatctgggggaataattcaggaaaatttccttaatctttctagagaggtagacttcaaaatataagaaactcagaatacacctataatttacagaatgggagaacatatttgcaaattatgcttccaacaaaggactaatatccagaatatataaggaagtcaaacaactaaacagaaaaaaccaaagaacttcatttaaaactgagcaaaggatatgaacactcatttctcaaaagaagaaatataagcagcaaacacatgaaaaaattctcaacatcaccaattattagaaaaaggcaaattaacaccacactgaaatatcatcttataccagtcagaatggctatttttaaaaagttaaaaaacaacagatgttggtgtggatgtagagaaaatgaaacattcatacactgatggtgggaatgtaaattaattaaatatctatggaaatcagcttggagatttttcaaagaactaaaaatagaactaccatgttactcagtaatccaactactgggtatctatccaaaggaaaagaaatcattatataaaaaaagacatctgtactcgtacatttaactcagcactattcacaatagcaaagtcatggaaccaatctaagtatccatcattggttggccagataaataaaatgtggtatatatacactatggaatattatgcagccataaaaaaggaaattatgttctttgcagcaacatggtggaggtggaggccattatccgaagcgaactaactcagaaacaaaaaatcaaatactgcatgttctcgcttataagtgggaactaaacaatatgtatacatcgacataaggatggaaataaggtgggaaataagagggtgggagggggatgagggctgaaagactgcctattggaaacaattttcagtatctgggtgatggctacgctagaagcccaatctccaccagtacacaatatatccttgaaacaaacatgcacatgtgccccctgaatctaaaatttaaaaaggcagcccacctgcaactcagtccacctgcatgaccaagggttgtgcccccttttctcccttcactagggtgaggagcttctgactgatgccaaaccagggagatcaactcagctggagtggaggaggcagggctggagtggcccacagaagggtggctggcaaagttccctctgcctgctcctactgtcactgttcaacacagaaagcctgggagggtccctgtgggtggccagggtggaggggttctcccctctgatgtcctctaagctcgccttcttaatctatgacttcctcccttgagggatgaggaaggatgacaggccctaacttgagttcacattggctaaactccaaaggctctcaatccccattaacaaacgtatgttgatttcaccaggatcacatacaactcttcatgaaattgcacatgcatttctccttatggggtctcagagccacagagatggaaagcagcatcttcatgtttacacatgggttaacacaggagcacaggccagctgcagagaagtgggcttgaacctcccagggcagaaacatagttgtcattaattagagacaacccaatctgaggaagagataaaatctctctacacttttaggttattttaattccctttctttttcctatctatctatatatctttttatttatttatttatttatttatttatttattttgagataggttctcactctgttgcccagtctggcgtgcagaggctagctgcaacctccacctactgggctcaatcaatcctcccacctcagcctcctgagtagctgggaccagaggcaggccatcatgcctggctaattttcatattttgggtagagacggggttttgctatgttgtccaagttggtcttgaactcctggactcaagcaatctgcctgccttggcctcccaaaggcctcccataagccaccatgcctgacttccctttctgcctaatgaaagcttccccacacttttcctggtgtcataagtataatgaacattttgtccctgagtcttgagagacacacagttccaggcaccttgtaaagttgcgttggctgctctggcacatttgtatgtggctgtaggcattaggcagctgggccaggcagtctagagccagagggtgcactgtctggctgtccatccatttccacacctgcacagacatgtgacccacctctctggaccctgcctatggggccgcacacaggccatgcacctgctggccaggcaccaggcacccttgtcataaatatctccacctgtccagcaatgaggtgggaacactcaattctttgtgaaaatctctgtatttacaataccagaagtgtgtgtattttgtgaaacaaaaactctctaaaaaacaaagcaagacaaaaaattgatgaagccaggcctcccattgcaggaagaatgttgagaagtgaagtgtggaggggtggcatgttctctttagcaccgacggttgctcagggaatgagcctcaaaatggagaaaaaccaaatgactgagtcccatccacccccagggctccagtgctctcctccatttcctcaacattgacctggcttatttctctggacgccttgtgcagggtgttgtgtgcctggaaaagcctctcataaccagcttgggagatagatgtgcagacacagaggggagaggctggggaagggtgggagaggcctgtttcccaacatcgcagctggcaggacccagatgcggagtccaggctgcggcaggacaggcgggtgcaagacggagaagggggacaagaaagagtaactcctcgggatgacggcattgaaggtcaaagtcatgcaacctagagaaagcccccaaagccctacacatataggcaagccattgtgttgaagcctaaaaaaaaaaacgaaacatggagcggggacattgccatccaaattagtcaatactgtttaaaacctaaacctgttatatttttaacttgtacttacctttcaaaaattctacggaaaagcataaatattgcattctagtagatgggggaggtggagagcagttgatttactctcaagatagattaggtatgactggacaacctcagccacagccccccaggtggtcccctcctcatgcgctcaggggccccatgtgaggtgcccttggcctgtgtgggtggcacctcgggctgtcctgtagccactgtctgcacacactggatggtaggatcctgcctgttgacactcatctctgttggggctgtgcttccttctttggggacaaatgactaagaggggaagtttatcttctgtaatgaaatgaggaaaatttgctgaagtttgcttggggggacagtgtggggtatctacaaagagaattcacattttccgaaagacactcattgccttctgggatacattcagaatttgagtagccaaaaaaatggaaagcagggacaagggtgtgaggagtataggaaataaaatacacaagtatttttcattgcaaaaaaagctagggagggtgatacagcattgaattcatatttcaaagactttgggggcttttttttagagaggaatttggcctaagacctcatggtcccaccctttggtgacagatgaagttggggctgttaggagtggaatgaatccatgtctggcatccccatggcaccagggtgctgtgttctggcaggtgcaatataaatccagctcattcagaggacaagctccctggtgacaaactctttggttgatcagcaagaattcaactcctttgaccataaacaaaggctcaatgtatatgtccagttcagcaacaaaggcctgttcatcttgggtgtttggtgccttagaagttgggctctaggggaggcagtgacaaagggggttctgcagtgtgcctgagaagagcagggagcagtggcaacatcctggagggaggcctcgggcacctagtggggaggaggtggcacctgggggagcaggtgatggggaggcactctcagctgggttgaaggcagctctttgcattgcagaatctgtgcttgggaaaagtactcccggctgtgtctcaggcacatccttgggctgcagggagcctgtggtagggaaaggcactcctggctgtgtggaaggcagatccttgggcagcagggaccctgtgtgcattgggactgtgcaagggctaagctgaggtaccttctccatagggaagagaagagagagaaggtcactgtgatggcattggaattgggctcagaaggctgcggttgcctggctcaaggggtggggccaggacccatcgagacccacagtgtgggccttgctgtgctcctcctctctcccctgggtgctgcctccagcctagactcctccttccagacctagctcaagtgtcgaatgtctcccctgcctctccaggcagccctgggtctctgactctggactccctcacttggggttgaacttgtcttcttctccctggtagccaggaggagcccccagttacctctgtaacccagcatggcctggaaggctctagtgagcatatggaagggatgagcactcaccacagccctcaaggctggctccagggacccttgggcgggtgacgagctgagaaggcagcagctccacggttcccttggtttgggaagaggatgatccagacccgtaggaacagctaattctgtcttgcaaaagcagttgctttgctttcatcctgggcacacaccggtgtagccaatccaccacccacacagctgcaagccacacagagattgtctttgtgttcgtctgcgatgccttcctctctgctggcttcttatgctcatgatcggggcaaccctgtctggagacttgatagggcctttcaaaaaggccctcagggtcactctaagtaaggtcaaagagactggggttcattcctgcctctaaccacaggcaagtcaatcagcctcttgggaatggcttttccatctctcaaatgggtccagcaatactaaacacggattggtcaccccaagtccattcttcctgtcttccttactaacgaagcctgcttttgttaagagaggaaacgtactcagctgtaaaatgaccttttcctggtctcccttgctgagcagcatagccatgtgaatgcactctggcaatggagtataaataggaattgttgggcattgctttaaagaaggctgctttccctttttccttcttctttctgcctggagtatgagtgtgatggctggagctccagaagccatcttgtaagcatgaaagcaagttgaaagcctggccttttcaaagagaattgttaggtttccccaaggctgttctcttgggggcttagcaggcagcgaattagataacaatctttctcagagcccctcagctttccatttcttaatttgcctaagctgtcctctgtttctggaatgctcttcctaaccttgtctgcccagtgaactgctgctcaccttttcagactcagctccagagtggcctcctccaggaagccccttatccttgctcccagctaaagtaccacccttcttggtctttctggtcatctcctggctgaaggctgagcctgttgtgggaaatgccatgtccttgtagatgtgcctgtccctgctctgcaagcatgaggactgtaactgcatccccttcagcacctgtggctggagggctgcagcaggctcccagaatgccagtgggcatatgccactttgcctcgacctccccatctgtgatgtggtgctgatgatgcccacagaccacagcagaggcagcagcccatcaatgcttgtggtttccctggcatggggcctgttcagctccttctgtactcaaggccacccttcccaggctgcctggaatcccaggggtctcctgccaggccagtctcagcctgatggtcccaaggaaaccctctattcctcacaggtgttccccagagcatgcagactttgagcttgcttgaacctgtcattcatgcagaaagcctccccttgggcatgtgagtggcaaatgcctcaaatgctggattcccttacggagacggtctctctcttactgagagggacccttctcccctctaggccccgtcctgggatctgccctctcctgcccctgccctgctagtccccatccaggatgatgctgactttccccttgtgccccctcagaccctgtcctgagccacctgtgtctacagctgcctgtccaccctcctccatgcccgattgggctcctgccaccttttcagggattcaggcttccttcttagtacaacccaagtgtgtcagcctgctctccctggctccacccatttagtcctcccaggaccatcttccctcccagctcacaccctccagagaagctctacactgctggcagaatccagtccctccacccagcctgcatgtcagaccgtccctgccaggctcctggggtctccacaccctgccttcaggcaatcagagcccagctacaagaagaactggccatgccctggcaccttccctcgctcctctgccttgagggctctgttcctctgccttaagggctctgctcctcacctctccatgttgcacatccaagcccagccatcatgtgcctcagcctcagctctgatgctgcctctgacaagctgacttccctgaaggggagcaccctggtcccaaagccccagagcactagagctgagcctctttctctttctccagacagcctctctctctccttgcagcacagagttggggactccttcccatcatgaaaccctcaacttccctgccccaggtcacacaccaagttcaaggctgagcacagagcaaaagcaaccagagagtccatgggcttggcccagacctcagcctggaggcacagggacaatttctctccacttctcctttgagcccaagaagtctcagcaccatattccatctgccactgccccctgaccacaggccaactggacccagaacacaggacacttcatcaggatgtctgggccacagtcccggcctcacagaggtggctcgtcaggggggctcaaagccccacctcactcttcctggcaccatccagactataaggcccagacaagatctcacctgctgttcagtgctctcttctgtccacccaggcctcagcttcaaccctcttgcctctgagcaatccctgtgtgcagtgaggccattgtgttcaaaccttcttctggcatggttaggaggcatagtgggaaccagaaaggataatgccactcccagaaggagatgggccctcctcctggcactgccaacccagcctgggggatctgtgctgacattgtgaggggctgcctgtgctagtttttgtgggaggggaggtgccagctatggggttccagggtgccgggggcctgctgactgccgaccactcatttctccctgccgtatatcaattttgacaccagtgctgaagtcctcccagggacattccaacttcagaccctgtactgtcttccttccttctcctaatgtttgtctttctttatttccagagctcctctttctttttctaagctaggcgctttacacacctattcttctttacttctcagagtaaagccctgcagaaacactgagacacaaataatgggtgatcaatgcttttcctgggttgggggctaagatggtcatctttccaggtgtgaggagagagggtgaggcaaggtggggacacagcgggccacctcctctccacaacaggatgagagataaagggtaggttcccctctcagtattctccctgtcaagcactaagaggagtctggcatgcatttgcacaggaggttcttagatgtgctggtgctctcctagtgtcccggacagctgatgagccagaactgtccacatccatcctgatgctggagtgggcaactgccaccaggtgcagaccactggcagacaggcctggattggatctggctatacaggctcaccttgccattcccttagccttgccatagcatagcctagcattctttatgtctccatttcattttatccttatttttgagacaagaaagatgaaagttggagaagctaaaccactctgagccatgttcttctatgattacccttggaaatgccaaaggggtttctcacttctccacagttaggcccaaaacagattcctgttcatacatgtcatatctgaaatgtttccttgtgaagcagaaaaacaaccaaaagtatattcaaaggaccgtgtctcactagaaatactcattcattcattcaacagagagccctgtatctgtgaacccagatgcaagacaacaactacttgtggaaaacatactcctgtcaacactgacctgcagggctggtgcgtgcctgtcttccacaccctgcatccgtgtgacactgactatcatcatgaacagattgacaaggacaatatttgatttcctacctttggttcaccaactccaagctgccccaaaatattcacactggctgtatcttctgcttgaaaggaatcccccagatttttactccactgacttcttatcattttttctcagtttaactgtcactccctccctcttcctctccttttctcccaaaagagtcttctctggccaaccaggcatttgttgacacattaatgactttcaatcctttggacagtatctgtcaccatatgactctccctaagaaaatgtaaacctgccatgaaagtgagacattcttcatctggttcattttgtcatcccagcacctgatgtggaatacatttttgctgaattaatgaatatgaataaatctgtgaatattttcctttgaacatttttccttgtgacaaagctggtcttgaaattaaagaaaaaataaaaaaatttccactgcttttatgcttatctagacctctagaataaggattcatggataatgaaatcaaacttgtatttattctagttattattagtaattatatatgtgtatatatataatctcatatatatttaaattattttgtatatattttagtgtattatgaaatcaggcttttatttgagcttttccccaatagcttgccaaagtttacaaaaacatttgtgttaaatcaaactaaatttgacctaagaaaacctctgtaattgcatacttgagttctcacacatgaactgcaacctaacaaactgaaaccctaaatgagaagtctgcttctgtaacaatagctgagtcttagccaatcacagcagccatgcttcaaccactcataaggagccaattgttcaaaccatgttcaaataaggcaaatgccaaggtgtaactaatccagatgtttgtacttcactttcattttctgtatgtcatttctttttctgaccatacatcatatctgaccatatggtagccacagaccctctctgaatctgttctgattctgatgttgtctgagacacatttttttcttgatcagttaaactctgttacatttaatttgtttaaatttttcttttgacagatttggtgtcagaagataagtaaaactgcaaaaggctggagaggcttcaagatggctgactagaggcatcaagaactcacctcctccacaaagaaaaataaaaatagcaagtaatcacacttcaagaagaacatctaagagtgaacgctggaattcaatagataaatgatgggaaataactgaggcatgaaaatggaagaaagtgaggcagcaagcttggctgggattggctgggaacccagagtggctccctagtgcaagaaaaaggttagtgagagatccacagcggttgacattctgaccatggattttataaccatagccaaaggaaaacccctcaaccctcataggccctgagactagcgtaggaaggtgcctagagaccatgtaacagcactgcttcagagggagctcatgtgggtcccagtccccaggtcttaggcagctgtagctctctgccatttggagagcccagccaccaccagactgcatcctgcactggaaaccaacagcccctgcatttccacatctctagagtcccactgacatctccctgtgttcacctgtagggcttcagtagtgcaatgccagttggacccagcagagcctccctagcactctagcacacacagtgtcctgcatcttggggaatggacagtgcagcacaatagggaggctgcctccccagtgtgctgagaggctgccctcagagaaaaaggagccaaagtgtgggtttcttagagcttgaaaactgtctacctggggcagttatcatggacagcaaccctgttcccaccccagcagtaaggctgccatgcacatgccttgagggcagggtctgctactgctcactgcatctgttgttgctgtcactggggccaaagcacatgccacttgacagtgactttgccctttttgggcagcagagccacgcatacttgcatcccctttactactggttttccctgttgctgctgctaccactgctgctgccacccctcaacagctaggggctgaatctcacacttcccagatcctgagaactcctgcctatggctggagccactgtaagcaacctgcctatggcccagccatttgcacataccctgaggacagtttcccctggcccactgctgccactgccacagccacttgagcactctgccagtgggcctggggacccctccattttgccaaccacagccatcacctgagtgttccattgaggggcctgaggatacacccacccaccttgacactgcttacctcagtgcccaagcacactgcctgggggcctagggattacccccactctgttcaccattgctggcctctatgtactcctcctaggggcctgatgatggacccactcagtctaccactaccaccacagccagcatccatttgcatgtaccactttgggtttagggaactggcctacccagccatcactaacactgatgtgtgttgcttcagagccttagagttgctgtgttgttgctattgtcaacactcactccacacatgctgccaagggaaggacctgcccgctggccaggcctaccactatgactgccagcacccaagccagccacatggaggcctaagaactggcccatttgtacctgctgacactagtgcctgtgtacactgcctggggtcacaaggagaggtacatttaccctgccactgccaccatcagggtttgagggcacacccacctaacatccccaaccgcagcaaaacatcatcatagcctccactaacaaccacagcctaagccactagggaaatcacacaccactgatactgcttagaggtgaagaaatcatagagacactacattacttcatacacttagaagcaaagctaaagtgtcctacccaataaaaaccatggaaatatcttcaggaaaaagccaatccaaaatgtatgaagaagcaactgttacaaaagatgtgcagatatcaatgtaaaacgcaagaaacatgactaaacaaggaaatatgacacttccaaaagattacaataattctttagcaacagatttcactggaaaaaaaatttatgaaacgtgggaaaaataatttttaaaaatgatattataaaagctcagtaagacacaagaggacataaacaatacaaaaagttagaaatcaactgaggatatgaatgaaaaattcaccagagaaacagatataatagaaaaaagaatcaaacagaaattctgaaagtgaagaattcaatgaacaaaataaaaatttattcaagagcttccacagtagagtggagcaaaaagaagaaagcatctcagaacttgaaggcagaccttttgaaataacccagccagagcccccgtccccatgccctactcacacaaaagaataaaaaacaatgaactaaacttacagaacatacgggacactataaagcaaccaaaaacagaaatttggggtgttccaaatggtgaagagacccaaggtatagaaaacctgattaacaaaataatagctgaaaacttcccaaatttagtaagagatttaacattcagatacaagaagtttagaaattcacaggtaattaaaaactcaaaaggtcttttccacagcacattatagtaaactgtcaaaagtcaaacagagaattctaaaaagagtaagagaaaggaaaaagctctggtcacatatataggaagcccgatcagaagaacagttaatttctcagcagtaaccttataggccaggagagaatgggataatacaggagagaatgggataatatatttcccccctaaaaagggggccaaaaaacctgtcagccaataatactatacctaacaacattattctttatctttaaaaaatgtgaaataaagttttttccacacaagcaaaacctgagggaattcatcatcactagaccagccttagaagaaatacttaagggagtcctatgcctggaagtgaatgaatgatagctaccgtcatgaaaacatacaaaagtctaaaacttgctggtagagtaaacacagaaataagaaaaagaactcaaatgttaccactatagaaaaccagcacaccataatgataaactacaagagagaaagaaaggaaaaatatacaaaacaatcagaaaacatttaacaaaatgacagaaataagtcttcatatatcaataataaccttgaatgtaaatggattaaattttccacttaaaagataaaatctggctgaatgaattttgaaaatgccccaactatatgctgcatacaagaaactcacttcacatgtaaacacatgtagactaaaaggaaaggaatgaaaaaagatatatcacacaaatagaaaccaaaagtgagtagaagtagctatacttatatcagataaaacagactttaagacaaaagcattaaaaagtgacaaagaaggtcatattatataatgataaagggatcaattcagcaagaaaatacaacaattctaaagatatatgcacccaacaccagagcccccatatacataatgcaaatattattaaatctaatagacttcaatacagtaatttttggggacttcaacagttcactctcaccattagacatgtcatccacaaagaaaaccaacaaggaaaaaataaatttaacctacagcttagaacaaatggacctaggagacatctacagaatatttcatccaacaactgcagaatacatgttcttctaatcagcaaatagaacattatccaagatagaccatatgtcaggtcacaaaacaaatctcaataaatttttaaaatatcaaaatcataccaaatatcttctcagaccatcatggaataaagctagaaatgaataacaagaggaacttggaaaatgtacaagtacatggaaattaatcaatgtgattctgaacaaccattgtgtcaatgaggaaattaaaaaggaaatcaaaacatttgttgaagcaaatgaaaatggaaacacaacatacccaaacatatggtatacagcaaaagcaatgcctaagagagaagtttgtagcaataaagacctacgtcaaagaagtagaaacaattcaagtaagcaatctaatgacgtacttcaaggaattagaaaagcaagagcaaaccaaacccaaaattagtgtaaggaaagaaacaatgaagatcagatcagagtaaaactaaatgaaattggctaaaaatacaaagaatcaatgaaaagcaaagttggttttttggaaagataaaatggataaactgctagataggctacccaagaaaaaaagagataagacccaaataaacaaaatcagaaatgaaaaaggagacatagtaactaatactacagaaatacaaaacacatcaaaaactattgtgaacaactatttaccaaaaaactggaaaacctatagaaaatggataaattcctggacacttacaacctaccaagattgaaactagaagaatcagaaaacgcgaacagaccaataatgagtacaagattgaatcagtaatgtgaaaatttaccaacaaagaaaagcccaggactgtatggcttcactgccaaattctaccaaacttatgaagaagaactaatgtaaattctcctcaagttattctaaaaaatagaagaggcctcattctatgaggccagcattattctgataccaaaaccaaacaagaacgcaccaaaaaaggaaaactacaagccaataaccctgatgaacatagacacaaaatatcctcaacaaaatactagcaaattgagtgaaacagcacatcaaaaagataatcccgccatgatcaagtgggatttactctggggatgcaaggatgatttaacgtacacaaatcaataaacatgatatatcacatcaacagaatgaaggacaaaaaccatatgatcatctcaacagatgcagaaaaagtatttgataaaataaaaaaaagctttttgacaaaaactcttgacaaattaggcataataacggcctcatatgacaaactcacagctaacatcatatgaaatggggaaaagctgaaagctttccctctaagaagtggaacaaggcagggatgcccactttcaccactcctattcaaaatagtactggatatcttagccagagcaatcaggcaagtgaaagaaataaaaggcatccaaactggaagagaggaagtcaaattttccctcttggcaaatgacatgattttatacttagaaaaacctaaagactccaccaaaaaacttctagatctgacaaacaaattcagtaaagttgcaggatacaaaatcaacatagagtctgggtgcagtggctcacatatgtaatcccagcattttggtggaaggattgcttgagcccaggatttcgagaccagcctggacaacatagtgagatgctcatctttattataatttaaaaaaattgttaaatcaacatacaaaattcagtagcaccaataataacagctggaaaagaaatcaaaaaggcaatcccattaacaataactacaaaagaaatacctagaaataaatttatccaaggaggtgaaagatctcaacaaggaaaactataaaacactgatgaaagaaattgaagaggacacaaacaaatggaaagacatcccatttacacaaactggttgagttaatattgctaaagtgattgtactacccaaagccatctgcagattcgatgcaattactaaaaaaaataccaatgccatttttcacacaccaactccacacagacagtgacctcagccgggaatggatttttttctgatcagcatcgtcatttctcactcagtgttcagatgacgttgaatgaaatgacgttattcaaggacctgctgtgtgacattttgcactgtagagagatgcacttgcaggtgtttccatagatcactctgacagcaggatatggggcggaacctgactcagacatgagcctcccctcaggtcagttcatagcccggctctaccactcaacaaccctgccacgttgagcctatcactaaacatcagagcctcggtgtccacagctgcgaaatgtagacagtagtgactaccttgcaggacagagaggtggccatgcacacagtaaggacctggagccaggctgttggatgctggtcctattgcttcctggctgtgtgaccctgggtaggttacctaactttctagggcctctagcttcctccccacaatagagttatggcatatattagtttgtggaatgtagttgcaacagtgtctggcccaccttaagatctatatgaatggcagctatgagccttcctgggtgttgtgagaatgaaatgagatccagtttctaaagggcctcctgctgtggtgcgcacacgaattaaactcactggaaaggctgttatatcattgtgggcactatatttggtgacagagagtaaggtttcacactattagcctgactttcctgatggatcgagtaatattgtttcccattaacataatgagcatccacaggataaggtgaaggagaatcctcagcatggatgggaggtagagtctggctcaagagcctctgaatcttgctgcttcattttgtatgagtgtgtagtggggatggcctggaagaggacactatcaaaaaatttattcagggaactgaaggtgatggagcagggagacacactcaatttaaaacaaaaaaaaattgaaattaaacaagactgactgcttttgccacaaaaatgctgaggtttttggtaaactgagccttggagaatttcctgcattattatgtgctgaaatgcaaaatgtttggatttgctgaaacaataaactaaacaaggttttaaaaggcagcagctcctctaaattcgacagcacactccagtcgaagaggctcaacttcccgagcttatcacacccccaggtcagcccacaatgccaagtcaggaagaggagtttggaaatagcctcctcacaaggccgggcatggatggagaaagaggcatgcactggttctgtcaggatcccccaacctgctgagggcctgagtgaatccctgtctgaggggagatcctggaagaggggtgtgcagcacacaggtggcctcttcactctgcagtgaagagacagacagcctatgcctgtcctggcaggacgtctcactgatgcctccacagccctgcagttgcagttgggctgcctggctggggccgagccacccatccaagcctggtctccagcgggttctcactgagatgcactctctctcctccagcctcagggctccttctcactcagggaacccctggctcaggcaggaaggtcacattcccagtgtctccaagcagaaagctgctgagctcaccagcagcctggctggtgtctggctctgtacactcatgactaggcttacagtctgaccctgtggctctgaaatgggctgaaggtctcagggggacgcgtcctctttagtgtatgattcacgttagaccctggggccagcacaccaaaggcttaaagaggagaacaggaattcctgtcagcctgtctgaattcttgggtacccgacagaaatcctacaagacactcagtcgggtgttcacgactacagttgggaaggacaaggtcaaattagattgtggcagaggagctagaagggagcccaggtctacaagccacagctatgggcctccctgggttagggacagatctggggttgatttctgatagccctggagacagccacttgtggccttgggcaactttctgggccactctgggcctctattttgccattagtaaaatacagattgtctctcctgctggagaatttcagggtgaacttcacacagtgacagcggaaagggcctggcagagccctgggcagtgtaattgccctccttaatacaattactctgccaccctcccccaaactttagctgcttttgggaatgggacaatttcagagacttgctccatcccctatctcaccacactgggcagtaaggccatttctggccctttcccatgcccaccctcccgtctcttgccttccctctgcttgaggtgcccgttttcacaccccacagtcgagctctgtcccttctgactgagcctctcgctgttcagtgcataaatctggactaggctgtggactggaactgggctgtggcaacgtggagaggccttatgggacctcagatggaaagtgggcttctgtgcaagcgtggctgggattgagagccctgtgcagaggcacagagccaggaacccagcagctggagcagccctgcctgcctctgacaccagcaatgccctgccaggtgtcagcacgcctcccagggcctcccggcccgtttcttatcagcagcgtccagaggcttgcagcctgcaaggccttctcagtgcgcagccacctggccactgagagcgtatgctgacctgatgcaggaggtctggccagtgcaggtccctctataaaccctggggatgagatcatcttccaggtgtaaaaggctggactgtgggaggcacagggagatgagccccaggcccagccagtagcagggctctccagggacccagggcctgagcagagaagccccttggtgctgatccgaaaggagagcagtgcagagtaagggcaggagccaggcccagggcacatccagccctatcactcgcgggctttaggagcaaggacatgccacttaatatctcagcgcttcaggccccttcagtaaactggataataatagcacgtaggtacagttactgggaggatgaaaacagtgaaagcatggcctaggctagcaactggcccacagaggactctgtatattactgaggcctcgttagtaattattagtcctcattcataataagttacaaagagaaaatcttaacaatttcgtcctccccatggtcccaaggcaatgatacaggaaggaatccttattccctgttagaaccaatgttgccccgacaacgctgtcagccatcccaaccagcacttctgaccccaggggaccagcaaaggaagcacatagtcccaagtccagaaacgggctgggaggcccatgggcaccgtttctgtgtgtcttgtgccgtcctctttggcagacgcctgacatggctctctgagccacaatcccagaggacagcagtcagggaaaaagcagtggccttctgtccatcaagtgtgtccctgtgccccagctcacctggcccctgtgctgacaccacatccatggcacctggcagcagcttgggtgagagaggtcacggaagatatccagattgccctgaaaagcaacgtggccatgatgaagccatgcagcctggatgccttctcaggaccccccggcccgccatggctctatcccaaggaacacacgcagacaaagctcccatttccccctgggggaggggcctggcagggttgcatgttggagacatggtcactgtggccacagagagttttggaatctggacaaaaaagtattttggttgtaggaagaagaaaagccaggggcagattcatacaaaaagtccaaaggcgggaggagcctgtggttccaagcagaggtcctgaaggggagcatgagttaggcctgggggcccagcatgggggcctgggcagggagaaggagccttgctgctggggcacacaaggggaaggcaggtgagaggaccatgccctgctcagggagtaggtacctgacaccagggaagagagaagaggaaggcagagaaaaacaggccagaaagcagcccaggacccacggcgggcagccccttggccactcggcgctgcagtcaggcctttctgggctccggtggggatgggatgagggccgtgtgttgcaaggcagtgcaggccgctggcaggtgacttcctccccctggagacatgtgccccacactctgaggagagacaggcctggcttccccagatgcccactgaggctgcagaggagcctgaccctcccaggaggaagcaagagatccgaccacagacagagccaggaccaagggggagaggggcagagccaggtaggaactctggggtccttctccctcaacatcagccacccaggcgccctctctacccctgtgcagggccccctgctgctgcctggctgggttcccctcagcaagatgggccctggacccgcccatgaaggaggtttcctcagggagagtggctgttgtgttggctccggggctcaagctcctgcacaggtgtcttgtgagggcgctttcaggcctccacctcctcccctccctgcagcacctgtcagcccattacagcaggcgacaagcccactcagtgacagcttttcctcactgcctgaagatcctgctgcccgggctggcaggtgcccctggcatccttgcagtgttcgtggtggtgagaacgtgtgtcaggactggtcatttctatttttttttctttctgatctgcatgaccttttgtgactcaggttgcctgacccatgcacctgcaggcaggtggtctaaagcccagggccattgccagagctgaggcacccctgtggaaaccagggactggtcagacatcagaagctgccactgtacagaaacatggatccttctagagagggagttcaatgtgtggggacagacctggtggtgcagaggacaggagccctcatatatgcctgccactggggcacgaggctgaggtggccatctggttgctcttggcatcacgtgtctaaagtccagcccctgtagagcctgccttcctccagggcccaggtctccacagtgggacccatctgccccctcctcccacagttccaggctgggggtcgcagcccctctccactgtgcttctcacctctatccttctcatccagaacactccttgacacctacagcaacaaacaatcacagtggggcaggtgtttacaggagccgggggcagaggcagtggaggcagagtttgtggtggtggagatgatggtatctcctgctctagctcctaaaaaacaatggtctgctgacttttcagacaactcttaagagcaagggtatggtgtcattgcctcagccagcaccgggcacagtgccggccactcccagatgtgtgtctggggaatgaaaggaccagtaagaagcccacaccacaggggaccatccttcacgtgagaaaaaagcaaactcctcctggtttgcagacatggctcttcccctaaatgctaacaacttcatcccggtcgccttggttctcccaaggccagccttgttggaggaggcctgccctgggagctgtgcaatggtcccagcatttgcaggtgactgtccgcatccacctggttgcagatgcagcctccctgggcccactctgcagcacctcagaggccacccttggccagggaggcctgttcccaccccatcccaggctcagggcctcctacctcagctactcaccactgcctatggcccctggtgtgggtccccagcccaggtgagccacagcctgctccccgactcctggcccctgtgttcactgggctggtgtccctcccagctgggtgctcgccaggcctccttcacccctcagccctgcagtccctagaagctaaccccagccagacccttgtccctgccaggaaacagggatccagagaggccaaatggagccacacctgcatccggagcctggggatggggctaagctctgtcctctccaccctctgctctgtcctctgtctgcagctctccgggctggcttcttccaccccagcttccagcacccctgacactctccccgccccagcctccatctctgcttttggctcctgctctgccttacagggggcccttcccacttctgtggggtggacatttcagcctcagccacaacaagccaggactgtgagctgcctgtggggagcttcatttctgtccctcaccagcccagcatggggcccaggggaagctggagctcagtaaagacagatgaaggaatggggaaggcaccagacatgtgctgagatccatgctggttcctcaaggcacagacagctgggggttacagcactgtcctccatttgggccctcaggacctcatgggggcccctctcttcctccctccacacaaaggctgcctcctggcccttgtccatctgtggcttccagaagtccggattgttgaggcagccctggtttcaggggttctggggtcacttctctctaggagccagggcaggcttcagccccatgtccaggacatcccaggccagctctctgtggccagcccggggcaggaggccctgcagaagcccaggtttgctaggctctgggaatgtgtggacaggtctgcgactccccgggctcatgtgatgagctgggagctgagggaaacttcccacaggcgggatcatggggcagtcacatgttagagtccctcagagggtgggcctgtgcctgggccccagagctgggtgggcaaaaatcacttgccttcttgcggcacagccaccaaacacaacacagcagcagtggcgcaagcagcaggggcggcacaaaatagagccagttgcaaaaaatgccctggctgagaaagacagcaatatgaaccacgcctaagggacagaggaatgccaggcctgggagggcctgggtagcctcatcctggtgcccaccacttggaggcccatctgcccattctcccttctctacaggtggtcccacctcaaggcacaacagtggggccgggggtaagggatgcttccaagggaactacaaacccctcctctggccccgctgaaagtctctgcccaagagccctgccaagaaagtcccggaagcttccactgtctgacaaacccaccctcactgcacacctcgcctgcagcacagggcttctgtgaggaccacaaaatctccaggtacaatgatgggcaagggtgggggtgctgcagccaagagaggtgcaggcgcaggagcaaggacaggagacccgggtccatccccacagcctctatccccaattccaggctctgcaccgtgggcacatccacacagagctctgagcctcagcctccacacctctgcaaagagaacgggcctccctccctgggggcacttgtgaggtttagagagctcagagaaagacctggctcagaaccagggccacatggggtgtaagcaaccagaactcttctctgggtgttcttcacagtaaagggaacgtgggcagcatccgtgggaatacaggctgcccaggccttccccaaatccagagttctgtttagagagaaagatggggaaggcaggggagggcagggaggggaggggaggggaagggaaggcaggagaggggaagggaagggaggggaggggaggggagaagaaaggaggggagaggaggggagggggcctgtgctgagaacctggctggctgaaggagaggaaccaccgaggctgagcatgaaggccgccggtgaggctggagccccagggctgctcctgatgtgcctgtcactgtggagccgttagtgggtggattcctgatggggaatgtgtgcgttcagcctgctaatccatgcgtggatatgcagggacaggcaggggtagacccagagggaggactgtcaacactggtgcgtcctcacaaataagactggacacaaggtggtggagtgggctcaggcctcccgcctgtccctccagcacatcctcctccctatgcggccctgggccacgctgcccaaagatgtggagctctgaaaagcaggcactgggggcacagcacttccattctcaggggcctctcggagctgagcccgggtcccagtgcccagagcctccccttcagcagcaggaggggacgaaatgcaggacctggtgagggagcagggagggacatctcaggggcccgagcaaggaggagaggcagaaaggaggttcaaggcatctgggcaatgacagcaggttacaaccaggcaggctcaggggccagggtcatgagcaggttcaggaccagatcagcagctggggcaccagttcagtggcacacgcaccctgatggcagtgtgtggaatcctccagagctcctgggcctgggaggtccacgtggagaaggtggacacccaagaggtactggactctaagctcctggcagacagcctcccagcttcaaccacctgtgccagctggaagccgggttggagcagcctcaggtgcctgctgcacacgctactttctgggactgcctggaaactgtctgccctttctgtgctccccagggtgtatctccttctagtgcagggactctggacagtcctcatacgtgtttgcagccccatgctggtactcacacatgtggtgctggtgatgctgacattgctcttgaatgttttgccgttgttcaagctgacttcaatgaagtactccctaaagcacagaaaacacagacggtgagagccagcccagagagatgcagttcttgaccttggccagtggacagcgtgggtaatgagaggtcattccccaaacgcttgcaggtaaactcagcaatgatgaccaaagggtaagtgggtcaggcagcgaggggccctgcatggggtctcatgccattgtgaccgtgtcctaaatgaccagggaccactgcttggtgtcaccatcccagctgttctgtatttacagagtctgttggcttaactctgagaagcaacctggagcaaaggtaccattcctcaggcaatcatctcctgcatcctgtcctcctcacagaccctaggatgctgcagatccctgaataccttgggggcggccaccaacaatagaaggtggagagggtgcccttaacccagtggcagacacgtgccgccccagcagtgggggtggcatccacattctgtacagctcacagtgcccaaccctgaccccctggcctcctaacctatagggcctcctgccaggtttttctatctttggtccagggcaagttttggaagtcttgtccatactgattggatgttcatctaaaaggaaatgacatgggaagaatgtcgatgcacttgtctgaccagtgtctctccccatgtctgtcctcagcatgcagagctgaccctgaggcccaggaccagcatctgggctctgccttcctcttacagagacccctgtgagcacccaccatacccaggccctgtgcaatgctctgctgtgtaacaggaacaggcaggcagagtccctgctctcaagggactcacatttagagattgcatgggacacagaaaacaaaattaaaaaacaaacaaaaaaaaaaccaggacagaacagatgacagagagtgcaacgtgctgtgatgtccatgaccagaggaggtgaggggaccagaggggcagggacagccacttcattatgtgtgacttctcctatcttgtagagccacaatttctggtctagaggaacatgaaataatgcaaggccagggatttgcttcaaaatactctgtggtaagggttccaaggaaagcagatgggggcaggttgagaattattgaaagtaggtttatggcacaattcttgttattttgtatactgttgaaaacttccatgaataataaattctctctgaaaaggtgacatttcagctgaaattaaaaagatgaggagccagccaggcaaagatcatgtgccaatgccctgggcagtgactcgctgaccttgtcaaggagggaaagaggtgatccagaacagggggcagggcctcgtgggccctggaaaggggttggggttttatttcttgtgcagtgaatctgtccaggttgggcagatccaggatgtattttgcacatggaggcaacaggacttgctggtgggatggatgtgaggaagaagctcagaggagtcaaagatgacatttgagtgtttgaccagaataaccgggtggacagtgacaccatttaccaaaagggggaagcctgaggaggtaactgggtttgtttgttttaagtctgtaattttgtttcccaatttttatttctttatatatttatttatttattttttgtgggagtgtggtgggctcaggagagttctgtaacatgtagacatagaaccttctcatcctgagcccacatccttttcatgcctcctgaagtgttggggagggcacgggccctgctgcatctgcctgctggcctggctccagctctctacccactgggcttggctgccaggaccccggcttcccagggccagcaactgcctggccaacctaggactgccagaacccgtggtatcgacgttttcgccaaggatgatttcaaaacaattatggcatcttcctcattttcctttgaaaacctttctctgcttttttttcacctccctaaatatgcacatagtttactctggcatgtgttttccatgccttattcctgaataaatagcacttcagtctctgtttgttattttggttgataaaaatcgtatccaggcacttcccagaagccagaactaggctctgcccctgcttccccatagggacatatgcaggacagagggaagtctctccctgacctgcacctccggtctggcatcagccaccagggaaggcacgctgccatctagtggggggtgcaggggagacgtgttcagtggtggccaacactccagggacatgttccggggatatcttcctaatagtgaaaataggtttaaaggttgttctcaattattttaaaaaataagcttccttttactcctggataagccatcaaccaggagcagaatggccatctacgcaggtgctcacagctgtggcatgggctccccactgtgagacgtcggtgctggcctgtgtatggagaggtagatggtaacctccagggtgggaagccagtacacccacaggcccacagaggaagcagctgaatgcccttcacggaggtaggctgggtaccccctttcccaggagctgccaccacagggaggcagaaggccctggtagggcaggaagattgcctgggtctgctttcctgccctgcaacatgaactgtatggccctgggcaggctcttccatcatgcttctctctagttctccatccatacgggaaagttgtcagaactaaaatggagtcatttgtgttaaaaaaataaaataaagtccatgacagttagggctaagaaaggctacaaagagagggttttatgcctatatgcctgataacaaaaatatcacaaaagactttgcaaaaaccacaaccttgcacaaaagccattgcagacttaacacaaaaaaatacttctacaggaacatgtgcccaagaactgcctgtccagccttggactagtgtcacccttgtaactgatctttttaggcaagagtaatggtctcaaaacaattccctaatcttcatttctcctttaaaagcctttgtcttctttacctccctgattatgcacattactatggcacacatattcccagtgccgggcaccgttcctgaataaatactgttttcttttagagagaaactctctgtcgttcaggttgacataaatggtgtccagaagtaggacctggagtaggaccactacttgaagaaatcagccactcttggaattggtgtgcagtcctcacttgagcccttggagctccctgtttctgtgacttgctttctctgccctggagagtcttctctcaggctgagcctcctacttttgggtggaagctcttgacttcattcagcatctgatttggataaggccaccgtaagccaaagagcttacatccctcctgaaatgataacaattttttgtcttttccagtaattctttctggtataatgacaaatgtttttctgatttgagcaccctagtttctacataatttacatttgtttgtgaggcatgtcttttctggcaaattcacttttagttctgcatgcctaattaaatatttgtttgatctgtatacccgggttaaaatatctgtgaacaatgacattggtttggttccatgtgtctgtaagtcatatggaaccaaaaaagcccacacagccaaagcaagactaagcaaaaagaacaaatctggaggcatcacattacccaacttcaaactattcacatggctatagtcaccaaaatagcatggtactgttataaaaacaggcacatagaccaatggaacagaatagagaatccagaaataaacacaaatacttacagccaactgatctttgacaaagcaaacgaaagcataaagtggagaaaggacaccctattcaacaaatggtgctgggataattggcaagccaccatgtagaagaataaaactggttcctcatctctcaacttatacaaaaatcaattcaagatgaatcaaagacttaaatctaagacctgagactataaaaattctagaagataacatcagaaaaactcttctagacactggcttaggcagacacttcatgaccaagaacccaaaagcaaatgcaacaaaaacaaaaatatttgtgggggggtaaattgatgaaaaaaattttgcatgtaattgacttggtaataatcagaataaaattatttataagtcttcataaagattgagctctgatattaaaaatacagtaatactaaactaaaaaattggtctcctatattagaacaccaaagttttcttgaaatattgatttgctattagtaaaattgcaagaggttttgatttttaattctgactgctgttttctttaacagccatcttctaaactgcaggcagtttctattcctggcacattttttcctgagatccatttaatttccccagtttcagataaggaatgcaatctttttcatgaagaatggtaattttattcattaaggtataaaatttatttatttattaaatagaaagtaattttatttatcataaggtaaataaataaatggtatttatttaataaggtatttattttcctcaggttcttatttcagaagttcaatttctgctgcatcccactgcacatggtctgcaggccatacaccatagcctgtagcgctcctactcccttcctccgaaaagttacagctttttggttggctgaggtgataactctcttctccaactttttcatcagctgctccaacttttttcctccagttctaacttggcttttatggcctggcactataatgtttatcttgaaggccaagaaaagcaatgttttccgccaatataactagattatgtactcttggcttttcttgatatgtctgaattgttccatgttaccaagaaacttcacgtggttttactttatctaagagctctacattcctctgctcaaggtactagtcttcttgtttatactctcctataatatgagtgtacattcataacacttggatatgttcttttatctctaattgaatttaaggaccctttcatcaggttcaattccaagactgaacaggcttcccatgagaagaagcaattacattgcaggagattttttttaccttttggtaactgacctaaaagacaaacaatttatatatttatattttaccaagataattttctgtgttgtctttatcaaatttttgattacttaagaaaactgagctttgaacaggttaaggttttaaaatatttgtaactttctgtattgcttttgaagtttcctgataatcactcgagttaaatgaatggctattatttaacagtgacctgtgattctattttgatctatggctttgaatctcttgatatttttggtgggcttctcctggatcaaaattctaaattaagtccttttgaactacaattaattttgagattttccagttgggcccttggagaatatgcaagaagatatattttaatttatagaggtattaaatgattaggcttatttggtaaattatatgacaagcattgtcaaatgagaagtgaggctacatcttcttttagtcacatttatgggtaggttattgataggaatgttctaaaaattatatgacaaaatctaatatattataagtcataattttggttgttatgttaaaacttctttaaagttgtatttatttggctgtgttattgatgtgagtattctaaagattataggaaatttataagtctgatacttgtgatatgatgctgtcagtcatgattatggttaatatcttaaattcctgcaggtaatggaaacaactaaattttcttgtcgattgtgaacttttatcagatttttaaccatggctattctaagttttttggattctactcaaaaagcatttgtagtcagttgttgtccaagttcttgttatctgtctatagagtagaccacatcccgaattcttctatgttccaccaatccagccttcttccatggaattactataaatggaaaactgttctgttccaaaagccctataagctgaaactagatgaattttaagaaagcagccttgtgcctgatgtatgggccacataaaaagtttacagtggctcacgcctgtaatcccagcactttgggaggccaaggcgggtgaatcacgaggtcaggagatcgaaaccatcctggctaacatggtgaaaccctgtctctactaaaaaatacaaaaaaaattagccaggtgtggtggcacgcacctgtagtcccagctactcaggaggctgaggcaggagaatggcgtgaacctggtcgtgccactgcactccagcctgggcgacagagctagactctgtctcaaaaaaataaaataaaataaaataaaaaataaagtttaccaaaccatttgatgccatgaccagagacaaactgcaaatcaggatgagaagttgacctttgcacactatagacagcttttttcaagacattggaaaagactccatagtataatgagactcctacactccttaaggttacctttctaacttggcaagataatggagtaattgaaatttcacaattactaccttctgcttgtaagttgacagaatctgacctaagagatcctttggtatacattgactaaataagaaaatgtctgtactattgctaatactgcatgccatccctggataaattcctcttggaaagtcaataccaatatacacaaagtaagaaaacaggccacatggttaaaacagatctcacctaattccttatgatcatttgatttattcagtgggttactgatgtggtttggctgtgtccctacccaaatctcatcttgaattgtagctcccataattcccacttgttataggagagatccggtgggggataattgaatcatgggggcggattcctccatgctgctctggtggtagtgaataagtcttaggagatctgatggttttatatggggtttctcctttggcttggctctcattctctcttgcctaccaccatgtaagatgtctcttgctcttccagcatgattgtgagtcctccccggccaagcggaactatgagtcaattaaacctccttcctttgtaacttacccagtctcaagtacgtctttattagcagcatgagaacaaactaatacagttgcctttaagcctaggttcatggataaaaactattatgcaaattgtattttccatttttaaactttttatatgttacttgttaaatttttgcagaagtacaacttgtaaccataatgctagcccatcactttgagataacagcaagactatggaactcacaaaattgaacttaataatggactcaagatagacttagcccgagagtcactcctttcaaacatcctttaaaggtcaactgtgactaaaagggattgacacttactccaagttgccaattgctccctccaaaatggaccaagacctgcaaccaggacaggcccatcccattatccagggacagtcaaaacctaattacagaatgattgattagtgaggtgtttgcagaaagatcttgatcaaaagggagaaattgtgaaagttctcagaatcaaaatggagttaacatgttaaaaaaacaacaaaaaaatcctggcaagctgaattggggaagtttatgaagagaagattcacatgcttgtatacctgataacaaaaactatcacaaatctctaccaaactacaacctttgcaaagaccattgcaaccttactcaaaaatacttctgcaaggacatctgacccgcaattgcccatgcaacctcacattggggtcacctctattattattgatcttagtagccaagaagaactaactcaaacaattatgtaatccttctcacatctcctgtaaaatctaaccttcctgaatatgcatgtagtttactatggcatgcgtattcccactgtgatgccctattctcagatgaacatcattttcttgtaaagagcccttgtctgtttgttatttaggttgacacatacaaaagaatttctgtaagtcggctttgaggattcagggagatagtgtgcataaggcacttggcacaaaatctgatttaagtgctcaataagcattagctttccttagaaaggggctgctcagtccctaagacactcccgagaaggtataacccaatgaaaaccaaattccctgagaccatccacacaatgctgatgagtgggaatgtggggatgacaggctcagccccttcctatgtacccacagaaaggaggaaaatggccaagaagcctcttggaggaagagaagtcatcctgggattaccatatggccctggaattagatttcagtgaacatactatcatcagatcaaatgaatgtatcaaggggccacctgggaagatcaaggaggatccaaaaatccaactgcaccccaggccctcagtggggaagagcacaccctacccccagcacccagggcacagtgtctgcctggactatgcgcttcctcaggccattccaccatcacagaggtctcctgatgcctaattattgccaaataataggggactttcaaacaaatgctatagcctttccatgaaccaactgctctacacatgtgattttgcttagttaggtacaactgtggctgaccatctataatatgaaaatccacacccaaaatgcttcaaaatctgacacttcttgagcaccaacatgatgtttgaaagaaatgctcattagagaatttcagatttcaaattttaggattagggatgctgaaacataagcataatgcacacattccaaaacctgaaaaaaatctaaaaactaaaatatttgtggtcccaagcatttcagttacagaatacacaaccagcaccatattagctccatgttaaattgagaaaatagaggctcagagtagaacactcatctggtcaaggtgacacaggcaatgtgtgcctgagccaggattccagggcccaggcctacaggctggcatcctccctcagtgcaaggtaaacatacccctctgggcaagctactggtgcacctggccagccagactcagacctccggggttgccaacatttcccaggagcagccttgtgggctttgggtcctgggctctcaagggaaggggaaactgaggctaaggtgggcagatgcagctgtgatcacagacccagtcctaaacccagcctcactgagggggaagccctcgtctaagatgctcttgaggcacaggtggattttttacttccccacttggcagatgaagggaggggtggccggccttcccagtgcctccttccacttgtcttcatggcctctaaccccacagggtccacagggaatggttggcaagggctgggaggcttggctggctgtgggaaaaggcagcattgtgtgggaaatacgtgactcagaggcaccgaggagacaacttaccaatgatagtgctttcactgaagataaatctgcaaataacttcatcccgtttctttagattctgaaagccatttccatgaataaccacatggtaggattctgcaaggacagcattcaaaaggttgaatgtggaagagtggagggctgcctctcctctgacctccctgttcctggagatcctcccccaaaactcaacttgcagatactcctgtaaggaaggagcagtgtctgaccaacatctatgtgtccactgggtcaaatcttcatctggtgtcactgagggtccagggggaggcagctgggccttgagcacactcaaggaccctctccctaccatccctgaaccaacacgctcaggaaaggccttggtccttgcacagggcaggctcagagtactattcctgccctgaaatctgtggtgctccctcaggccccaggggtacaggcggtgcactcagccaggccctccctgatgtaaggtgtaagtggagccacaaggctgcctgaagacaccatgtctcatgcctcagctgggcacccaggccttgatgcctccttcagggctgctgaacactcggggtctctcctccctgtctttctgtgtgcctgtggcaggcaggacacccacaggggcaggggcagggccaggactcgggtaggacaggtgaggcacctacgaccctgctcagggcaatccatcacagaagtcctgttttagctgcgattccagagacctacaggtaactcctcatctcctgctcttcctgatccagcaaggaccacagggcacccaccctgaggctcagggagtgtgtccttccaccactgtggctcctgccctgagacaaacaccacaggggacacagggcaggtggggctggcctcaggagtcagcagaccgcaggtctgcagctgccaagggcattggcctccacccctgcctcctggcccaggccccacgcattccaatccctgctgatgcctggggtgcccccagtccatgcacccgaggaaagcttcctctgaaccctgcttcctgctttcctgcagcgtcacaccttcaaggcaggctgtcggtgaagctggcctgctgacatactttctgaggctttcaagtattttcaaaaatgggggctcacagttgaaagcctgaacatttcccctaaatatccagatttctagctttcttaggaaatgggaaatgcaggcctcagtgggtttgtgtttctccgtgtcagctcctggctgggacctagggaaccatgctcctcagatgaggagctcccaggcctgcctcacttcaaggccccacacactgactgctgacatcagccggctgggcctggcctgctcctcctgctcaaggtgccagcccagcccttgtgggcacccacttgatggatactatgctgtcctcagaaaaccctgggcctggtgggggcactgaggctgtgagagagcaggaaaggccagcttggtgccctgtgctgagcaaccagacctggccccactcagggtaagcattgggtgctctcctaccgctaaggcagacaacagctgcttccaaatctgatgctatcaggcagcattctcaacatcttccttgctcaggtgtccaaagggccctggccagtcggacctgagctcagtgtgcccgggagggagcaactgggcctgtggcctgcgccccttggtcagcccaactcggccaccctgagcaggactgagggctgccccaaagcttcacgatcagggtggttgcaaattacattctaagctgtgttaggactacatattctatgtattgcaaacattgttttttttttttgcaaggtggatggatgaaaagagagggagaaggacagacaaaggagcatgggcaaacattcattgtaaaatcccagtggtggatagaggtgtgtttgtgttcattgcacaatcctttccactcacctataggtttgaaaatttcaacaataaaggttggaagaaaaccaaagaactaaagaagaaaattatacttggacatagacaaccggaaatcatgatacaccctgggtgacaagtgactgatgagagggacagaccaagcccttggttgcagggagtcagaggggctggtcatcaggaaaggcttccaggatgaggtgccctatgaacagggctgtgaaggacaggtgggctcggcccttcgaggtgaggcaaggcttgcagagtgcctgtgctccacctggtcccacctctgcacaaggtgcccagaacagggagcggcccctggagggcctgggggttctgctaagagcctcagacacctgccaggctggagagggagatgcctgtcaaaaccctccagccatgtgtgggggatgggctcaggatgggcctggagcagtgaggccaccagaggcctctcccaggctggataggaggcccaggcctgaatgagggagtctgggctgtgtgcctccctccctggcctccttcctgggctccctggagccctcctggtttcttggtgacagcctgctgagagggctcattctgttgcatttgagttccaggctcctgccttggcctttccctcctgtgactgtcaccctccatgtggggcagctttgcacaactcagccaacagctgacaggtcagggctgtgactgcgggccacatgggcagaggcagagggccaagctggtgggcagaggcagagggccgagctggtgggcagagggcacctgtcacctcgactcagctgcctccagggaggagttacaactcacatccccacctggggttgacaggttgacagggctgctcagacgccacagcctgtgcatctccaggggacatcatcagagcacagctgtcacactggctgcatggctgagcagctttaaatcaggagcagcagaaagagaccctgagggggaggggagctctctactctatccccaccctcagctctgcatcggggagaggcggtgtcggggacagagcccaggaccaatcgtagaagtgtcagcacagctcctgttcctgggtcctaccagctcccagccctgtgccagtccctgcacagcccagtgcctagggactcacgacaggcctgacagcgtcctttctgttcatgggaggcacctctggagctcgctgacattggactatttgctctggtcgtgtgcccatggagagcagagctcagacatggaccgtgtgtcggtccccacagcctactgacagggcaccctgcagtgaggaactgggaagccagagcccagctgctgctctggggccagcggcacccagcctcgtgctgtccccatggaagagagtcacccaaggctctcttcctctccagcagcggtagttgcgtaaatgccggccatgcggagtcccagcgtgtgcaggcggaggtcaggacagacgggtcatcacagaggaccacacaatgtcaccacccatgccgggaccccagatggcaagaagtcacccttgccacattccagacagtagggacagatgctgggactgatcctgtgggattgaggtgagctgagggtgtttgtgcggatgcctttgttgggctatggaggtttccttctgctcacagggtgctgtgggatgttgacgcccccacttcttgttcttcatcccctgagataaccgcttggtccctgtttcccgttttgttgatgtggtaaattatacagatatttcaccttctgcacctgcctggccttcctgggaggagccctggctgctcctgccctgtggtctgggttagctgctgttccatgccatttgctggtgtttccctgagaacttctcacacatgtcttttcttgctttagagttaaacttattgttgtgagctaacaacacactaattgtacacaggtactcacaccatcacccctgcatattccccccacagcaatagacactcacattcacacccatgtgggccacacatccacacccactcacccatgcacactgcaccacacacttaacccaccccataccacacacatcacaccacacacaacacgcccgaagcacacacacccacacaccacacacacacataaatcgcaaacacacatacagcaaaaataccaaagacacaccacacatcccacacacacaccacacacatcacacacgcaccacacactctccactcccccaacacacacccagcacaccccacacacacaacataaacagcaaacacgtatacatacaccatacacacacagccatggcacacacacccaccacccactgaatgcacacacaaaatatacatacatgccatcacaccatttccttccctacatgccacacgcacaagatatccccatgtagacacccacatatgacacacacaacacgcccaaacactctagtcccactgtacacacacacaccacagacacacataaatagtaaacacacatactccacaaacagcaaacacacaccacacatcccatacacacacaccacacacacaagtagtacactcccaactcctccacacaacaaactcacacactagacaccacgcaccaggtacccttcccacacacttccacagcaccccagcttatgccacacactctgcgcataccccacacacaccacacacacatgcatatatgccccctacacacactcacacccccacacacatacaacacataccctcctcagctcccacaccacatacacccacaacacaacacacacagatgcatcactcatgcacaccccacacacaccacactcacagcacatatacacacctcacatacagatcacacacacgtttacacaacacacagaccacatattaccctccccgcagacttcacacacttcaagcctcccacagcacaacttcccacacatactatacatactgcacccacacaaattacatacacacataccacacacaccaaacacatacacaccacatacacacaccacactcacacactccccacacacatcctcccccacacataccaaacaaatgcacacactccatacacgcatgcactagtgcacaccaccctttggcaaccgcagggcctccgcagttctcacttcctacacactcagaggaaggctccacagacgtcacttcaagacaggtctttgacatgaggtggaacacaggaggggtggggcagggcagggagagtgagcttctggccacaggagccagacccccagcccctcacctccactcactcacagcatcaacagtgcttctcagggccttgaagccatcctccactgcaaacacatggtccggaccgcctgccattgctgttatctacagagagcagagctggtttggactcccagcccaggggtgagcatgcagcagatccccagcccaagggagagcgtcctgcccccatgctttggaggcagcagaataccaggctctgagggccacagccttctccagccagcagcccactctcagggagtggggagctcttccaccctcccctctggtttagtaggatttatatgacatgctgtcatttctgcagtagtcatagggtggcccaactcacttgaggcagattagatgacccttcttggggtggccctaggaaagctgtctgggacacctttccatactctaaccctaacctgaccacaaggctctatattggtgcctggttaacctgtttggaattactgggtctttcctataatcagccatacccacggtataaatggtggcccccaggctccgagccctttcagcttaagggaaagaaggcattgagtattaattaccaaaatacagggagcaaaatgctgataaatacgaactgaactcacttctttgagagtgtccaaagatggatgtttcatcattgttccatcagtcatagcaataatcatgctggaaaccttgtcatctgcaggagaagcaaggagtggcctgctcagcaaaggccccagaagtgacctccaaaagttcctgtattgggagaaaagctgagtgttgggagagaagctgaggcagggcttgcatgtctgctagacttgctggctccttgcttctagcacttccgttatctcaagcagctgtatgtttctcattcacttgatacactgtttcctttcaacccccacatcctcaccacctgttttttgtttgagcaccaataaacagcatgggctcccagagctcagggcctttgcagcctccacacttgtgatggcccactggtcccactttctctctcaaactgtctttttctcattcctttgactccaccagacttcatcactcccacgatatggtgttgggtctgattagcccaacactccaggacccctgcgggctgctgggcccacagcactgatcactccagggcatgtccaggtgcccccatctcatcctccaggggagaggctgccaagagccaagcacctgctacacagagacccttagagtgagggaggtctcagcccagcacccattttacaaaagaggagctgagaggggcaggctccttctcaccaggctgcctgaaccctcacccactagcagcctgcaccacctctgcctgagggcagctgcagccaggactccacaagcacaggcctgtcccatgggtagggggaggagcagcttggctctcctgtgggcagagcctgcgggcagccctgccagcatctctgggcccaggagtacaggattccaggtaagtggtacctgggcaggggaccccacatccacctcaatgcctttccccaccaaccatgccttttcctgacaagagttgcaggcacactgtggggagggggtcggcagctgtggacagccttctgcatcatctgagacacagtcaagggatgcaagtcactcagaggggaaatgaggaagggaggaggaagactaaggtgtgtgcaagggggaaaaccccttggctcttctcttttccttttcacacagcccagctggagggcaagcacctcagggttatcagcaccagaactgcacacgcaggatcccacacagttctcagaactccatggggcgagggcttactatgctcattgcaccagggagggacctggacctcagaacaggtgagcaacttgctccaagaggcagggcaggtgtggccttgcagagtctgcacacagagctctctgaggctcacgcccagctctgttccacctatgggaccaccatggggacggcaggtgcttaaacctggagttgaaattttccatctgccgaattgcctgcaagaaaatgaagaaatattgagcctggacagtgaaatgttcccactgatgctctaagaccttgtcaactagaatcgattcttggagctcaaggggtgtatacatttctaaaccctgcctgcatgaatatgtgtccttcaggcaccattttctgaagtttgtcgagaccctcttttattttcttcctgaaaaaactccaaaaaagtggttgacgtggaaagacgtggactgctaaaaattacctctcaagctctctgggagccactgctcactgtgcaaggcctcggggatggaggagggggccaagcaagggctctgtcctgctcattccttactgtgacgttgaccatagatgacaggccttctgatctcatcctagttccagagaatgtaggcctggggaatctcaccagggccccacttagaccatctctggtgacagtgggagcttcccatggatgagcaactgtgagtcaggaactgcaatggggccgatattcctaaccctaaccctaaccctgaaccggggatgggcaactgagagtcagtcactgacaatggggttgacattcctaactctaactctaactctaactctaactctaactctaactctaactctaactctaactctaactctaactctaactctaactctaactctaactctaactctaactctaactctaactctaactctaactctaactctaactctaactctaactctaactctaactctaactctaactctaactctaactctaactctaactctaactctaactctaactctaactctaactctaactctaactctaactctaactctaactctaactctaactctaactctaactctaactctaactctaactctaactctaactctaactctaactctaactctaactctaactctaactctaactctaactctaactctaactctaactctaactctaactctaactctaactctaactctaactctaactctaactctaactctaactctaactctaactctaactctaactctaactctaactctaactctaactctaactctaactctaactctaactctaactctaactctaactctaactctaactctaactctaaactctaactcaactctaacactctaactctaactctaatccaaactctaacccaagaaggactctcttgtgttgggcactccgtcctttaacagggagggctgcatttgggaaaagtcatcctgctaagcccccagccctgcacccagacctcacagccccagacccctgaccctgactcagtttcttcctctctctttaccctggtacaggaaataccaaatctgcttaattagactgcctggactccttgacttcctgtgcccttgaaacaaaaagaccaaaagctggagaggcagccctgacggctgtgcatgcaggggctgaacactgatctgcagactggctgggggatgtggcctgtcagctgctgttaaagcagacagaatgggctggggcagccaggactggctctggtggcaggactgggacaggctggggacttagggtcaggctaatccaatgtgacaggctgagcctgcacagcaaggctgagcagagcatggaccctgaaggatggcttcccactgcgggcagacagtccctgccatggccggagctctaagagccctgcctgcccagctcaggaggggagaaggccagacccatccatacccagaagaggccatggcctggccttcctctggccatgcccaaaccccactccccttctgggtcacccgccacagtcctccccaatagacttgctttttaccacctcacacccactccagtctctctgccaaacccacagcgcaggacacacagatccaagcctccccctagctcaagatgtggcagcccaccttgtatcccctcgaagctgcaaatagggtccaggcccccatccagtcctcagtatcctcacctctctcttgcacttcacctcctctgggcccagttctgggcatgtgcattggaagtgccctcatctcccgccaaacaggaactctgcagtgcaccctgctaggtctgggcacctctctaggccacctcaagccacctgagcttgctcctcctacctccctcccaccagtttcccagcctggcctggagctcagaaccccacacagggactcccctgtctgggcctgccagcatccctgcactaaagccccatgactctcaccactggctctgaccctgtctccctccttcactggccagggcaggaggaacaggcacagagcagcagccagcacaggtgtgtgttcacaggacacacactcccaccctgccagcccctgcaccccaggaatcttcacagccacctcccagggaaggaggcagggtagagggagggcaggggagtgtgaacggggaggctgagaaattctggagcacaggggcctgcaggtaaccttgcagccatgggtaggaggatgcaggggatccggggctaaggtcagggtgggtactgtgagttgccctgaccggccttctccatgtgctgtcaggctcccaaccaaggtctctgggagcccttcagctccctggagctccctatggctcagctcatcaggcctccctttggggctcaaagcagcactcacttgtctgaggtgagtggcaagacagtgtcgccatctgtggagtaggtgacaaaagacatccgcatatttgcgctgagaaggaatcaagtactggtgaaaagccggaggcactggctcagaagccagggtgagtgatgccagttccccacctcccaccccaactctgttatgaattccctgttgtgattaacaggaaggttgacatggtgactttgtgacctgcagctcttcccagtgtcctgcatgttgacaacaccagggggaggcacaggacctttggaggggccacaagaggaagcctccatttcccttacaacagccctcatagtgtcccttaaaacccccagaccctgccatttgtttactggaagagttagcccaggtgacctaggtgaggacattgctgtgggtgaggaggtcaaggactgggaggccagagtgttggcagtgacaggtcatttgtgtgacactgaagtcccccagggggtagcagatctggaaggagacggaaactgcagtgttgccagagtctttgtgaatgagggacattccggttctctactgctgtgcaccagaccaccttcatttagggacacagagcaggcccattttattatgctcacaggttctgaggatcaggcactcggggcagagtgggaagggctcctcgtgtctggggccccagatgggaaggcttgagcagcccaacatgacttgaaggattgggcactggaattatctggaggctgctccactcacaagtgtggctcctgggcaggagggctcaaaagctgggctcagctgggactgcgaatggagaccctgcatgtagcctccctgtgtgacctgggcttcctcccagcatggcagcttcaggatgcttgggcttttacaggtggcccagaggtccaagagtgagtattttcagtgagcaaggcagaaattgtagacttttatgatatcaccttggaagtcacacagtgtcacttccactgtactctattggtccaagcagtcacagctgccaagagtcaatgggagggaacacaggccctctctctagggcagaagtgtggatgagttcacatcccagtgtcaaaactactgtatgacaaatgctttgaatggcagagacgttacagtgtgtggaaaaacgtgggtactgatgatgggattcaagttggactcagaaaagttagactgtgatagttagaaataccttaattttattttcttcatttttgtatgcagaagtgatatatgattaaaaattcttcttcaataagtctaaaatagatctttcaatgtatttgacacaaaaattacaagtgatagccaggaagggtaactcatgcctgtaatctctgcactttgggaagctgaggccagcagatgacttgaggtcaggattttgagagctgcctggccagcatggtgaaaccccatctctactaaaaatacaaaaattagccaggtgtggtggtgcacatctgtaatcccaactactcgggaggctgaggcagaagaatcacttgaatctgtgaggcggaggttgtagattgcaagattgtgccattgcattccagcctgagtgagactcttcctccaaaaaaaaaaacaaaaaattacaagtgataaaaagcactgggttagtggactttggggggtttctgtcttgctttggagtggtgtttaaaacaatggattattttaaataagtggtattttagaatgggtagagttggtgtaattcctctgaaagcatattaggttttcctgcttcacatccttcgtgacccttggtagtgccatattttattttattttatttttaattatgttttgacatctaatcaatagacaaaagtattgtcttaatttgcagtttcctaattactaaacagttgttcatctgttctcatgattttgggtcattcctgtttcctcctttgtgaagtgcctgctcatgcctgtgtgtccattctctgatttgggtgtttatcttttgcgtattgattcattcatattctttaaattctgaatactaatcgtttatcaattgttgcaaatatcttcttccatggtgtggcttgttttttcactctatttgttgtctcttagtaaagcaaaagttgttcattttaatccagttgtttgtcatttttctttttcttttgtttttttgttgttggtggtgatggtggtggtagtggtggtttttgtttgtttgtttgctttgttttgttttgagacagagtctctctctgttgcccaggctggagtgcagtggtgtgatctcggctcactgcaacctctgcctcccgggttcaaacaattctctgcctcagcctcccaagtagctggaattacaggcaacccccaccacgcccagctaatttttgtatttttagtagagatgaggtttcaccatcttggccaggcttgtcttgaactcctgacctcgtgatcaacccgcctcagcctcccaaagtgttgtcattttcttaaactttaagatttgctctgttttatatcttaagaatttcttccgttagaggtgaaatacattttattttacaagttttaaagatttgcctttcacattgaagtcttgattctacctagaattaatttataagtgtgatttgtgccagatatttgatttcattttttgccatgaagctaacaaattgtcccagctccatttgtggaaaattccatcttttgcctattgatctcgtcactacttgtgtttcaagttccatatagatttgaatctgtttttatttatttatttattttgagatggagtctttctctgttgcccaggctgtgtagtgcagtggcaccatctcaactcactgcaacctctgcctcccaggttcaagcgattataatgcctcagtctcccgagtggctgggattacaggcactaggatgtgcagcgttccttgggaacctggggtggatacgtgggagaatgatatatacacatgagaaatatagtttgtgcttttcagatgattaaattgggagagggaagggggtaaccagaagataacctagactcatctgacacatacacaaagttcttcacatacacactgcgcctggctaatttttgtatttttagtacagactaggtttcaccacgttggccaggctgccaatctctatctattggcttatattgatagcatccataccacattatcttaatgactatatggaggaagactgtattactgtccatcattgtccctttccatttaagggaagggctgcgctccctgccatgtttgtggcaggttttgattgaccaatggaatgttaacagaagtaatgtgtgccacttctggacagaaaatgtttaagagtctaggtatgacttaggtggccccgacagcctggtgcctgagcaactaggatgtgtggcgttcccttgggaacctggaatggatacgtgggagaatgatatatacacatgagaaatatagtttgtgcttttcagatgattaaatggggagagggaagggggtatctggaagataacctagactcatctgacacatatacaaagttctacagcaagtcttcacacaatacggtcaatcatccacttttttttcttctggttattgttggctatttgctctttgacataaattttagaatcagctcatcgagtctcctctctcccaaaaacttcttaatgtttgattacaataacattaaatgtatggattcatttggaagaaacaggtctgcagtgagagttgtcctatcagtgaatatgacacatggcatatgtctgtttatacaggtcttttccagtgcctttcagataaattcccctatgaagattttgacctcattggtccagtgccttcccaaaatacactacattttactactattgtaaatgataatttaaaagtttttaaactgtgtatcatatacagaaatgtacttacatgtttatatattgacccacctcactaaactctcttctatgaatttatctgtagattcattttgatttcttgtaaaatataattttttttaaaaaaagaataagaattgtgctgactagttctccaatccaatgttgactagtgatggaggcactcttgattttacagagaatgtttctaacatcacaattaacaatgatattctttgaaggcttttggtagaaattctttatcagattagaaagtttctctactaatcttggtttgctacaagtcacaaacaagtgttttatctaaatgcttcttctggtattttgtgatgaacatgtatttctgtccagtaatctaaatttagtatgtttagatacattaatgcatgcaaaaccaattttaaaatgctataaataaacctaacttggccatgatattttaaaacatgctagagtttagtcataatttagaacttgttgtttatctatgatcatgagagagatgggtccatactttccgatttctgtgctgtccttatctgtttttggtattaggtcataggagactcataaaatgcacctggaggtttgctctttctcctaggaaggactttgaacatgataaatataatctgctctttgaatatctggtatgatatcatccttgcgttttcttttgagaagactttaaaatgatataatttaataatttctggatgttatgaattctgtctcccccaaaatgggtatgttgaagccctcactggtgatgtgactgaattattaggacataggggctttaaggaggtaattaaggttaaatgaggccataagattaagcccttaatcaactaggactgatgtccttacaagaagagagacgccagagttttctcttcaaggatgcacagagcaaaggccatgtgaaaactccatgagaaggtctctgcaagccaagaagaggagtctcatcagagaccaatcctggtggcaccttgatcatagactttcagcctccaggactggttgcaaataaatttttattgtttaagccccccagcctgtggtattttcttatgacacccagagcagactaacatttatttatttattttttattattatttttgagatggagactcactttgtcgcccaggttggagtgcagtggcgtgatgttggctcactgcaacctctgcttcccaggctcaagagattctcctgcctcagcctcgagagtagctgagattacagggacgcgccaccaggctcagttaatttttgtatttttagtagagacagggtttcactgtgttgcccaggctggtcttgaactcctgacctcaagtgatcagcccgccttggatcccaaagtgctgggattacagccatgagccaccatgcctggccctaatacttacttagtgtttctgtttctgtcaattcatatgacatatttttctaggaatttgaacattaattagcatgccttgttataaagttgttcagaatgtttttaattcttatatttctgctctatctgtagttacatctttttaattcctattattgcttagttgtgccttctctttttctaggcattctaaacagggaggatattgtccctaaaggagtgaaaattagccttgtgtgggtcttactcttttaaaatataaaacgcagatatgtatacagtacataaagggcaatctagtatatatgtggaatcaaaatttcatgggggttaacgaggagatactattaagaaaaataaagcctaaaacatttcccaggatggggagattagaatgaaaaacagaaaaggataggaagcactgtcttgttttctgatcaatttcactagcgtattgtctatgttagcaaacctttcaaataacctttagatttgttattactctctattgcattttttgttttctatttatagttatttatttaatatcctctacctttcactttctgtgggttcattttgctactctttttctcatattttcatttagattattagctctttattttcaaccctctttgctgcaaaataaacctaataggccgcaaatttccctctaagtttctctttcactgaatctcataagttttcatatttaatattttattatcagttgattttaatttcagtgttgatttctactttgatacattcaattttcaacttccaattttatgtggttttaaaaaattctttttgtcattgatttccaacctaatcgcattataatcagagaacatggtctgtatgatactgtttctttgaattttattgagatttgtttcaatacatgatttgggggaggattctttagaagaccattaaaaccaagtttattaattgtgttgttcaaatcttctaagtttttagtaacactgtgtctactcaacacatgcgtgttgaaatttctcaaatacatggtgggtttcacaatttctccttatagtttatgttttttgttttattttattaggtgcatgcaagtttagaattgttatggctgtctagaaaatgcagctgattgggaactgatcctcttaaaccctggtcacgctttctctgtgctgaagactcccgcttccttttggtttccccagcatcccggccacatctctgtatcttttcccatccttttatgttaaacttttttatgtccttatgtattagatgtgtctctttttgaaagtatatagctggtttctgttgttgttgttgttgttttgagacatggtctcactctgttgcccaggctggagtgcagtggtgcgatattggcttactgcaacctctgcctcctgggttcaagacattctcgtgcctcagcctcccgagtacctgagactacaggtgcacacctacacattcgattagtttttgtattttttttggtagtgacggggattcaccatgttggccaggctggtctcgaactcctgacctcgaatgatccgcctaccttggcctcccaaagtcctgggattataggtgtgatcccaccctgcccagccaatttttgtttaagagtcagggcctcactctgttgcccaagccagagtgcagtggtgcactcatagctcactataacctggaacttctaggctcaagtgatcctcctgcctcccacagtccggtaagtaggactatagtgtgcgccaccacacccacctatttttgttttctgtggtttctttttttggttttttttgtttgtttgtttgtttgtttgtttgagagaaaggttcttgctatgttgcacagactggcctcaagcagtcctcccacatctgcctcccagagctatggaattacaggcatgagccacggtgctggattggatttttttttctttttcttttcttttttagcagacaaattttgactttaaatggcaagttaagtacattgtggggagcacgaaactgcaccaatcagatctctgactgtggggagtaggactaggggaagggagtgttttgggaatccactctctaccaccacaatgggccaccacattcacagaaagaccacatccctcacaggcttcttttagccagaggccagcagggatatgaaaacaggcccatgcctaggaaatctcagactcctcagatggctcaaggtctcccaagctgcttggataaactttcctggaagtggtctccctctgaaattattctatccttttattttcagaaaactccccatattggtgatggtcattattttccgtacctagccactcaccttaatcagtgtgttcccagcttctttgctcaccgtcatttcttgaactccactcttccaaattgtttccttctttctgaaatacattcttatcctttcatcaaggttgtacaggttgtaaactcacactttgcacatctgacaataccttcattttgtgctcacacttgatttatattccagatagatacagaattctatttttgaggcacccaaggacatatcactggtggctgtggcaactttatcattggtttcaccaccagtctttcctgggtaatctgtgttttgagtttggtgactttcaaattgttttctttgtctctgatgttctgcatttcggatttgatgtctctctctattcctcaatgttctctcttccataaaagaaaagttttgcttcaggactgtcagaggcagtcaaaccagaacgactccattttgagtgagggctaggaaaatgaggcggggacttgctgggctgcgttctcagaaagctaggcattcctcgcctctagatgttcacagttaagggaacaaattaataatgtttactaaacagacccagacttgggagtatccagatatcaagatatctggagaacaacggcattcctaattttgctttaaagataatattgatgcttgcaaaatagagtaattaagaaaatgaatcctttatcacaaacccttttgcagagcacatctccccatctacacaagcgttgtacctaggatgggggctttactcctcttactttcgggaacgtcccactctgtctatggagtagctgcactttgaccacttgactttcttaataaacttgcttttgctttgcactgcagactcgccctgaattctttcttgcgtaagattcaagaaccctctcttggtgtttagatggggacccctttcctgtaacaggaccatctctaaggtttgatatatgttctgaacccaacttccccctcatcagacttatgtttgtccttgaggatctcatctttgcaacagaccctccaaagccttggagagaaactcagcgcttcctcacggtatctccgcgcacccactcacccctaccacgtcagaacacccactgagtgacggaattaatcaatgagggagcagggactcggggtggttttcctttcagtacttgaagaattctcccttctccaaaggaagctactttgcaccctacgctcaagcaatgtgacccatgcacacttgcctgcaacagcaccaagaactgcaattacctgagactctatcccatctaccctcactccaccactgcaggggaaagcccaggtcctccgagtcccagcgcagtctccacccaccccacagtcattccgtccagaccacggcccttctgccctggccccctgccaccctccaggggcagttaagtccctggacacctctatgttctaagggtcgcggagccccccttcctggcaaagtgctgcgcggtcacagctggggcgaggggagcggaggtgtcggggcgctcctggaggatctgggctacttgggccctggggaggtgccgctagcggggccgccaggtcgcgcggggagggagagccgggaggccacggaggtcctccgcgaagagggagccacaggcacggggcgcatcgccgcggcccccctggcgcaggagtgagaggtcggggagcctagagccagagggccgcagcgagagctggagccgccttcaagggatgccctcgccctcccgcaggcgccggcgcccggcccagcccgagccatcagagggctgtccgccgagctgagcccggggagggctgggctgcccagctgatcagaggctttctcccggattgcgagttctctggcccgcggcaccctcccgcgcgggggccgcccacccacaagccctgccccgaaggcgtgtgcggccaggaaggcggggcctggtgtcctcagggctctggcgccaagttcagagccgcgcgctgggcgcttggcggtggcggccgcgtctgcacctcctccctgcgcgccgcctgacagtctggagagacaacttagcttgagcccattttacagatggaaacccgaggctcagagaggttgagtgctttgctcagggttactgagaggagtgaggtttctgcatctgcctcttcggaggcattggctgaaattcatctctgatgtcaggcaccccctctgaggaatctgctcggaaaaggcatcgggagctgcagcacgtggtttgcatcctctccatgcaacaaaggacctagacttccaggagtcacagggtagtctgcagggcagggtagagatgttccacagaagctggtcaaaagctggaatatcattaaagatcacaatataccacaacatcaggttccattatttctgaggaggcaaagcaactacatattttagaaatttactgttaatttcttatttccagtcagtctcacccaaatgtttcaagtgcaaagccctggcctcccactgtcttcccacaacccaggtctgtatcctgtcccttgcctcccctgcacctggcattgcacagaaggtgtgggtggcaatgtcccctaaaagcttctgcaaggcttagcttcctgctgtgctgtctgtgcctctatgagtaaacgcaaaatgtcaagaaaaggattcaattgtcttgtatctaaaaccaggtatttttttcaggtgaccctgaaaattcagagatttataatttgatcatctatgtactttttcccaggaaaggcactgaacgggttacatgtgcagatctttgtatatactctgttggagaaaggatctgggctgaagacgccagcacctagcacaagccctggatgagaataatggggcactacaagatgaacagagagagggctggggcggggaggggtggatgcaaacgattatggccaagaagtcaccttaggggaaaaacataagaagaattcttgcttgcaagagagaaggaagcctatagggagagtgaggggagaggccgaaagagagagaaggaaaaaggataaaagagaaatagccaacaaggcggacacaagaaaaagggagagatgagagaaacaggagaggacaaggagacaagaagcagagaggcaagagacagggacagcaatgggactcggaaaggacatgggagagagctggaggaagctgacagagggaagggaagaaccccccgccgtcaaaggcaggactcaagaacgctgcctttcgtgcaagtgagatgggctccgctgcccgcgcccgcttgttctcggtcttggccgacctgagggtgcgtctctcccgggctctccagaggcgcgcagggggggaagtgcagacgcggccgccaccgcccagcccagggcgcggctctgaacttggcgccagcgcccagaggccaccaggccccgccttcctggctgcacccgccttcggggcggggcttgcggttgggcggctccggcgggtagggcgtcgcgggccagagaaacggcaacctgggagaaacccccctattgatccgttgggcggcccggccctcccccggctcagctccccggagccacccccagctggctcggaccgggactggcgcctgcgactatgcctgcgggagggcgagggcgtcctttggaggcggttccctctcacgccgccgccctctggctcctgggcctgccgggtctcggcgatgggcgagggctgtgcccggtgcctgcggctccctccgcgccgtggacccccgcggcctcccggccttccttaccccggcggcctggcggccccgcgagcttcacctccccagcatccgaatcgcgcagctcctcccgcgagcgcccgccgccttcgctccccaggccccagctgagaccgccaggaaggcgggctcctcgaccccagatcataagaggtgtctgggaactaagggtgggagggggccagggtagaaaatgtcagttcaagtacgttaaaattaagaacttaggctttgtttaaaaaacaataaatgaagtgaaaaaaacaagccacagagtaaaagaagatacttgcagcaagtgataaaggattagtatccaggatatataaagactgttattgagtcaatgtgaaagagaaaaacacctgaagcaaagaatggatgccggcattaaataggcacttcaaagaggaaccatgaacgaccaaaatcaagtgagtaggtgaccagttcccattagtaattaggaaatagcaaattaagaccacaaagagggcagtgagggtggctcacacacctctaatctcagcgcttgggagtccagggccagaggatcccttgaggccaggaggtggagtctagcctgggaaacatagcaagaccctgtctctacaaaaaaataaataaataaaataagaaaaaagtaaaccacaaggagatgacttaccaccaggcaaaaatattaaagtatgctaataccaagtatcaagaagaatgaagcaagatagctcaaatatgcttttgaaggaaatatactgggcttcattcattctgaaataccccttatttaagatactctattatattaaatacagttccaaaacaaaagaaatcaaagaacaaaaaactaacccaatacttttatcacttgtaatttgtatattacacatattgaaagatatattttagacttattagagaacgatttttaattggatatcactcttgtgcatacaaaataaaataaaattgattaaggtgtttctaacagttacagtctgacttttctgagtcctgtttgagtctcactcattggtgcctacgtctttccacacactgtaacctctctgctattcaaagcgttggtcatacagcagttttgacactgggatgtgaacctgtccacattctttccctagagagggggcctgtgttcctgcccattgactcttggcagctgtgactgcttggaccaatagagcacagtggaagtgacactgtgtgacttccaaggtgatgtcataaaaagctctacagtttctgccgtgctcactgaaaatactcactcttggacctctgggccacctgtaaaagcccaagcaccctgaagctgccatgctgggaggaagcccaggtcacacggggaggctacatgcagggtctccattcacagtcccagctgagcccaggttttgggccctcctgcctaggagccacacttgtgagtggagcagcctccagataattccagtgcccaatccttcaagttatggggccccagacatgaggagccctcctaactccgccctgagtgcctgatcctcagaacctgtgagcataataaaatgggcctgttctgtgtccctaaatgtaggtggtctgttacacagcagtagagaaccggaatgtccctcattcacaaagactctggcaacactgcagtttccatctccttcccgaactgccatctcctgggggacttcagtgtcacacaaataacctcccattgccaacactctggcctcccagtccttgacctcctcacccacagcaatgtcctcacctaactcacctgggctaactcttccaatgaacaaacagcagggtctagtggttttaagggacactgtgagggctgttataagggaaatggaggcttcctcttgtagcccctccaaaggtcctgtgcctccccctgatgttgtcaacatgcaggacattgggaagagctgcaggtcacaaagtcaccatgtcaaccttcctgtcaaccataacagagaattctgtccccagggtgggggaagggccaggcaggtagctggaagcaagtctcccagagccagctgctgaccctagtccctgcgatctggggaggtacctggtggagggccatagtgtgcactggtgaaagggcaggaggaggggtgtggccccgggcataaggggaggcggcaaagaaggggcctgtgctcagcctctctgggccctggcacaggcacccaagagtgaggtggggtcacagggacagccagataatggggagccatgagtccctggggccctacttcctggtcttcctgctgctgctgctgcttcctccaccgctttttagagcaggaagccttcggtaccatggacctgactggagaatatttcaccgcctggccctgggctccaggagagcccaccaccaccatggcccaggatggaggcagcactggcgccaggggcaagcaggtcacagatgccagggctcatttgacctctacttcatcttggacaagtgagtgtcccttctagctctggccctgggtcaccctcaggagccactgtctctttttcactagggacaggacaccactcaaggagatgcaagcttccgtcacagaagcagggccaaactttggtcagaccagacctaggcctcctgtttttctgaggcagaaagaatgccctggctttcttttccctggtgcttcatctcctggatgaggaaaaaagccaccaaaggggttctggacgattccctacccctccatcagctgggtcagcatcctcatcctcacgctgctgcaacagatgattgctcggacctgcctctcagcagttctcagatgctcactgcggatgtttggggtttctgtgttgttttgcttgtttgttttttcacgcaaatgacttctattttactgggccccacagagattgctttgttgcctgtgttgggcattctaatgtcactgcttagagaaggcctttggttggctgcttctaagtgcctcttctgcaacttggagagccacgcgatagttcctacactttcagaacagtttggtctgtttcaggctggccctggggaagctgggctacgtattaggcaccttctggctcaccaggaaagaaaagaggcaaatgttcagctttggagagattgccttggttccctttcctgctcctcctgctgggtggtaatactctgtgcttattcagtagcagcagtggtgcaatcttcaggagaatgttgcagcactttctggcctccaaagcccttcccctgcactcctggcacctcaccacaatcctgggctgtgagtagtacaggtatttttctatctggttcctggacaagggtggctcctggaggttggggaagcatccagagacagctagtgtgacaagactccggcttcctgtgctgcacactttccagcatcgcaggttgaaattcctctgatttttctcattcctcctggatactaatggttaggggacgtgtaccccagcccaccaattcccatggtttctgactgttctgctactcttggggaaggagcaactcagttctggagacaggcagagtccactcactagccacatagtcttgggcaagttgcttcatcattctgtgccttcgtgtcccccatctgtaaaaagggtatcttcattttcaccttgccaagtgtgatgaggatgaagggagaatttgcaggtcagaggcgatgacagaggatggggatgaagggacctgccaggcaaggcagagccacaggctagaaactcacaggaactgcagaggccctgatgtaatcccagacagactggatgagggggaatgcagagggagtgcctagagtggatgtaaagggagcagacaaaagcaaccttaatgagtcttcctaacaaggctgggggtaaagggcattgccccattctaaggaggaggcaatgagccaggtcatggccagggaatgacccaccacagcctccagatagaccatggtgctgaattgaaactctggattttgtgactccaaagcccatccaaagaccacgcagctgggcgggaccctgagaaacttgcggtaatcctccaggcagaaacaacatctactgcctgcaggcaggctctttggtcattagcgtccagcttattcatgagactcattattcacttgttcattgattggattgagctggaagaaaatgaatcagcctcccatgcgctcctattcttggccaggtgacatttgagggctctaagtgggaatgaccccttgtattttttgagtaattttttaattgtgggaaaacatacataacaaaaatttaccatttttaagtgtacaattcagcggcattaagtacattcacagtgttgtgcaatcaccaccatccatctccagaaatgtttcatcattgcgtattgaaactctattctcagccgggagcagtagctccctcctgtaatcccagcaatttgggagccaaggcaagaggatcgcttgagtctaggagttcaagatcagcctgggaaacatgcaaaatcctgtccatacaaaacatacaaaaattagccaggcatggtgatgtgtgcctccactcccagctactcagcctgagctgaggcaggaggatcgcttgagcctgagaggtcaagactgctgtgtgtcaagattacaccactgcactccatcctgggcgacagagtgagaccctgtctcaaaccccatccccatcaaaacccaaaaaacttctatttccattaaacaataactccccattcctcccttccccaagccctagtgacctttagtgtattttctctatctatgagtttgcctattgtaggtacttcatgtaaggggagtcacacaatgtaatcaagcaaacatataatatttggccttttctgtctgacctttttcacttagcataatgttttcaagtttatcccatgttgtcgcatccatcagaatttcatcccttttatggctgaataatatttctctgtatgtatatgtaccacattttctttatcttttttttttttttttttgagttggagtattctgctgcctggctggagttcagcggcgcgatctcggctcattgcaacctccacctcccagtttcaagcgattctccctgcatcagcctcctgagtagctgggactacaggggcatgccaccacgccaggctaatttttgtattttttagtacatacagggtttcaccatattggacaggttggtcttgaactcctgacctcgtgattccccggccttggccttccaaagcgctgggattccaagcgtgagccacctcgcccggcctgtttatcttttcgtctgttgatggacacttgggttgcttctgccatttggcaattgtgaataatgctgctatgaacgctggtgtatacgtatctcttggagtccctactctcacttctttttggtatatgccagggagtgcaattgatggatcctatggtgatcctatgtttagctttctgaggaaatgccaagctgtttcccacagtgattgcaccattttgcattcccaccaacaaaagcccaacatttgctattttctggtttttgataatagtcaccccaatgggtgtgaagttgtatctccttgaggctttcattggcatttccctagtgactagtgatgtggagcatcttttcatgtgcttattggccatttgcatatcttctttgaggaaatgtctattcaaatcctttgcccattttttttgttgcatttttttgttgtttctttttcgttgttgttgtaggagttctttgtatattctggatattaatcccttatcaggtatatgagttgtaaatatttcctcccattctgcaggttgtcttttcactcctttggtagtgtcctttgatgcacaaaagtttttaatctggatacagtctcaacttttctatttttaattttgttgcctgtgtttttggtgccatatccaaaaaaatccccaaatctaatgtcataaaagttatgttttctactaagagcttaaaagttttagcctttacatttaggtctttgacccattttgagtgaatttctgtaatggtttacagaagggtccaacttcattcttttgcacatagacatccaattttccctgcaccatttcttgaaactactgttctttcccacactgagtgttcttagcacactggttggaaatcgtttgaccacagacatgacaggttatttctgagctctctgttctgttcattgctctacatgtcagtccttacatcagtgccataatagtttgattactgtagctttgtaataaattctgaaatcaggaaatgtgtatcctcaatcttgttcttctttttcagatttttttttttgctgtatgactaatgtcccttgaaattccatatgaaatctagtgcaaatttttttatttctgcaaaaaatgctgtagagattttgatacagattacattgttatcttaacaatattattattgtgccttctgattcataagcatgcaatatctttccatttattgtgtctttaaattctttcagcaatgttctatagttttcagtacacatttctttagcttccttgtttaaatttattcttaagtattttgttctgtttgatgctatcataaatgaaacttttttggttgattttctatatttggattgttcactgggggcttttccaaccagtacattctctcccatttccactctacacagtgccccacctaacctgatcagccacctggatggcaacaaaagccccacatcccaggaagctcctcagtcccaggcagatggggctgggtggtcaccttatgctgaccactcaactggtgaaactcatgacctcggatgatccagtggccactgggggtgtaccccagcctcagctgtgctggggtcaggagagcttgttaagagcctgctgggaggctgggggcggggcagacacttgcccatcggagagatgcactcatctccctgacccacatctccttttgttttaggtctggcagcgtgaacaataactggattgacctttatatgtgggtggaggaaacagtggcgaggttccaaaggtacagatctctgcatggcagcctcccctgagctgcagagagcttttcttctggaaggcaggcagagggcacatcccatcagatggggtgggcgtgggagtccttcagtgggggacacagagcacaaggtggcattctgaagcaggaatgaggccagcactcactggttccatggggtctcagcggccttggctggctcctgcctgtgagcccagacatattgcaggggaggcagtttgcccttggggacatcacacgctgggaagggacaataggcagggaaaccagtgactcagtcctggaactccgagttgctgagggttcaagtagggggcaaagaactccgtggaaggttaaaggaaaaaacaggaactcctaaggacaaagtcaaggatggcttccaaggatgtgggtctttgaactgggtcttgcaggatggaaaagacaggggacctgtggtggcgtgagtggtctgacttggctgggaatgagattagctcagggagggctgggagagggctgggcaggtcagcttgaggccaaagccacaggggctcattatgccaggccaaggagctgggatttcctgctctgagccatagagagccagagaaggctcttgagcaggggagtggcatgatcaagatggcacttaaggaagaaaagtctgatgactgtgggtaaaatgaatgggcaacaagggcaggagccatggggagctccgctggggacgtatggcagcactgtcgctgagggccactgagggtcagccggcaggaaggagggtcagggagaggaaggggaggctgtgtgcatggctgccaatagggagagtcacttgtctgagatgaaggagggatgacggagaggagagggaggagggaatggggtgaagaggcaaagaattttccagtagaagggaggccagctgggagggctgtatgtgcatctccctgcctgttcattataaggtatgtgtgtctgtgtgtgtgtgtgtgcaggtgcctgagtgtgggtgccgtgtgtgcgtgttcatatgagtgtgtgcatgttcaggtgcatgtgtgtgggtgcatatgtgtgtgactgtgtgtgtgtgtgagtgtgtatgcatgtgtgtgggggggtgtgtatacctgtgcgtgtgtgagagtgtgtgcgtgtgtgcctgtgtgtgtgtgcgtgtgtgcctgtgtgtgagtgtgtgcgtgtgtgcgtgcatgtgtgtgcatgtgagtgtgcctgtgtgtgagtgtgtgcctgtgtgtgtgagtgtgtgcctgtgtgtgggtgtgtgcgtgtatgggtgcatgtgtatgggtgcatgtgtgagtgtgtgtgtatgcatgtgtgtgggtgtttgtgtggtgtgtgcacctgtgtgtgtgtgtgcctctgtgtgtgcatgtgtgtgcatatgtgtgtgagtgtgtgcctgtgtgtgcgcgtgtgtgtgtgcaagtgtctttggggtgttgggagtgtggggatgcagtgagttgccatcctgactctcccttctatggagcccttgtctccacaggcctcagagtccttcactacatttatctcacctccttgtgtccagcaaggggctccaaagcggaagagttggggtgggaggtggggaattggcctcaccaccttggcttctgagcctgtgccactggcttctcaccagcacatgattccttcacagcccaaatattcggatgtgcttcatcacctactccacagacggccagactgtcttgccactcacctcagacaagtgagtgctgctttgagccccaaagggaggcctgatgagcttggccagagggagctccagggagctgaagggctcccggagaccttggttgggagcctgacagcacacagggcaggccggtcagggcaactcacagtacccacctgaccttagccccggctcccctgcatcctcctacccatggctgcaaggttacctgcaggcccctgtgctccagaagttctcagcctcccccacttcacgctcccctgccctctctccgctctgcctccttccctgaaaggtggctgtgaggattcccagggtgcaggggctggcagggcgggggtgtgtgtcctgtgaacacacacctgtgctggctgctgctctgtgcctgttccccctgccctgaccagtgtgggagggagacagggtcaaagctggtggtgggagtagtggggctttagtgcagggatgctggcaggcccagactggggagcccctgggtggggttctgagctccagggcaggctgggaaagtggagggaggcaggaggaacaagctcaggaggctggagcccaggcccagcagggagcacagcagagttcctgtttggccggaggtgagggcacttccaatgcacatgcccggaactgggcccagaggagatgaagcacagaagagaggtgaggacactgaggactggatgggggactgggccccacttgcagtttcgagggaatacagagtaggggagcttgagtctgtgtgtcctgcgctgtgggtttgtcagagagactgggtgggtgtgaggtggtaaaaagcaagtctatgggggaggactgtggcgagtgacccagacggggagcggggtttgggcatggccagaggaaggccagggcatggcctcttctgggtatggatgggtctggcctcctcccctcctgggctgggcaggcagggctctcagagctccggccatggcagggactctctgcccacagtgggaagccatccttcagggtccatgctctgctcagccttgctgtgcaggctcagcctgtcacattgaattagcctgaccctaagtccccagcctgtcccagtcctgccaccagagccagtcctgactgccccagcccattctgtctgctttaacagcaactgacaggcctcatgccccggccagtccgcagatcagtgttcagcccctgcatgcacagctgtcggggctgcctctccagcctttggtctttttgtttcaggggcacagaaagtcaaggaggccagacactctaagcagatttgctacttcctgtatcagggtaaagatagagcaggaaactgagtcagggtcaggggtctggggtcattgggctgggtgcagggctggtggcttagcaggatgacttttcccaaatgcagccctacctgttaaaggacggagtgcccaacacaacagcgtccttgttagggttagaatttggattagagttagagttagagttaggaatgtcaaccccattgacagtggctgactctcagttgcccatccctggttcagggttaaggttagggtttgggttagagttagagttagagttagagttagagttagagttagagttaggaatgtcaaccccattgtcagtggctgactctcagttgcccatccctggttcagggttaaagttagggtttgggttagagttagagttagagttagagttagagttagagttaggaatgtcaaccccattgtcagtggctgactctcagttgcccatccctggttcagggttagggttagggttaggtttaggaaagtcagccccattgcagttcctgactcacagttgctcatccatgggaaactcctactgtcaccagagatggtccaagcagggccctggtgaagttccccaggcctgcattctctgtaactcggatgagctcagaagggcttgaaatctctggtcaaaatcacaatgaggaatgaggaggacaaagcccttgcctgggcccctccttcatccaggaggactggcgcaaagaacagtggctcccggagagcttgggagctgatttttaacagtcaatgtctttccaggtcaaccacctttttaaatttttttcaggaatagaataaaaaacggtcttgaccaacttcagaaaattgtgcctgacggtcacacattcatgcaggcaggatttagaaaggtatagaccccttgatctcctaaccctaaccctaaccctaaccctaacctacaaaatcttagagcatcagtgggagcatctcactgtccaggctcaatatttcttcattttcttgcaggcaattcaacagatcgaaagtttcaactccggaagtaagcacctgccgtccccctggtggtcctgtagggggaacagagctgggtgtgagcctcagagagctctgtgtgcagaatctgcaaggccacacctgccctgcctcttggagcaagttgctcacctgctctgagctccaggtccctccctggtgcaatgagcatagtaagccctcaccccatggagttctgagaactgtgtgggatcctgcgtgtgcagttctggtgctcataaccctgaggtgcttgccctccagctgggctgtgtgaaaaggacaagggaagagccaaggggtttgccccttgcacacaccttagccttcctcctcccttgcatgtcttccctccgagtgacttgcatcccctgaccctgtctcatatggtacagaaggctgtccagggcccccaacttccctccccactgtgttgctgcagctcttgtcaggaaaaggcagggctggagaggaaaggcgttgaggtggctgtggggtcccctgcccaggtgccactggcctggagtcctgaactcctgggcccagagatgccggcagggctgcctgcaggctctgcttacagcaagacctggccccctgggagcctccctgagcctgtctgttacaggagggcccagcagctcctccctctgcccgtgggacaggcctgtggttgtggagtcctggctggagctgccctcaggcagaggtggtgcaggtcgctagtgggtgagggttcaggcagcctggtgtgaaagaccctgcccctctcagccccttctctgtaaaatgggtgctgggctgagacctccctgactctaggaggtctctgggtggcaggtgcttgggtcttggcagcctctcctctggaggatgaggtgggggcacgtggccatgccctggagtgggcagcgctgtgggcccagccatctgcaggggttccggagcttctggaggtcactcctggtgcctttgctgagcaggccactctttgcttcttctacagacaaggttcccagcatgattattgctatgactgatggagaactggtggcacatgcatttcaggacactctcagagaagtgagtccagttcatacttaccagcattttgctccatgtattttgatgaccaatatgcaatgccttctttcccttaggctcaaaaggctcggaaactgggggccaacgtttacaccctgggtgtggctgattataatctggatcaggtaattccaagcaggtaaccaggcgccactttcaagcctagtggtcactttcgagccaaccgtcccgggccaccccaaggacggttgtctaagctgccccaagtgagttgggccaactcatggccactgcagaagtgattgacagcatgttgtataaatcccaccatgccaaaggggagggtggaagagctccccgctccctaagagtgggctgctggctggagaagtctgtgacattcagagcctgacattctgctgcccccaaagcatgagggcaagacactgtctcctgggccgggggtctgctgcatcctcacctcctggtggggagtccaacccagctctgctctctgtagataacagcaattgcagacagccctggccacgtgtttgcagtggagaatggcttcaaggccctgagaagcaccattgatgccgtgagtgggcagaggtgaggggctggggacctggatcctttggcaggaagctcactctccctgtcccgccccacccctcctgtgttccagctcacgtcaaaggtctgtcttgatgtgacatcggtggagccttcctctgagtgtgtaggaggtgagagctgcggaggccctggggtagccaaagggtggtgtgcatgagtgcatgcgtgtatggagtgtgtgcatttgtttggtatgtgtgggggaggatgtgtgtggggagtgtgtgagtgtggtgtgtgtatgtggtgtgtatgtgtttggtgtgtgtggtatgtgtgtatgtagtttgtgtgggtgcagtatgtgtagtatgtctgggaagttgtgctgtgggaggcttgatgtgtgtgaaatctgcgggagagggtaatatgtggtctgtgtgctgtggaaatgtgtgtgagattgtgtggggtgtgtatatgtgctgtgagtgtggtgtgtgtggggtgtgcatgagtgatgcatctgtgtgtgttgtattgtggggtgtatgttgtgtgggagctgaggtgctgtgtaatatgcatgtgggggtgtgagtgtacgtagggagcatatatgcgtgtgtgtgtgtggtgtatgtgcactgtgtgtgtctggcatgagtgggggtcttgtgggagtgtgtgggaaggttgcctggtgtgtggaaggctgctggtgtgtgggaagggtgtctggtgtgcaggtatgtggtgtccagtgtgtgtttgtgtcgtatggggagttgggagtgtgttgctgatgtgtgtggtgtgtgtatgggatgtgtggtgtgtctttggtatttttggtgtatgtgtgtttgctatttatgtgtgtgtgtggtgtgtgggtgtgtgtacttcgggtgtgtggtgtgtggtgtgatgtgtgtggtatggggtgggttgagtgtgtttgtggtccagtgtgcatgggtcggtgggagtggacatgtggcccacatggatgtgaatgtgtctattggtgtgggggcaatatgcgggggtggtggtgtgagtacctttgtacaattagtgtgttgtaacctcacaacggtaagtttaactctaaagcaagaaaagacatgtgtgagaagctctcagggaaacaccagcaaatggcatggagtagcagctaacccagaccacagggcaggagcagccagggctcctcccaggaaggccaggcaggtgcaggagctgaaatgtctgtgtaatttaccacatcaacaaaataggaaacaggaaccaagcggttatctcaggggatgaagaacaagaagtaggggtgtcaacatcccacagcaccctatgagcagaaggaaacttccatagcccgacaaagtcgtccacacaaacaccctcagctcacctcaatcccacaggatcaatcccagtgcctgtccatgctgtctgagacgtagcgaggatgccctcttgtcagctggggtcccagtatgggttgtgacagtcctgtgtgggcctctgtgatgcctctgtctgtcctgagctctttctgtgtaggctgggggtctgcatggccggcagttgcacaactgcggctgctggagttgaagggagccctgggtgtcctcccttcatcacgagaggacattactaggcccttagcaagaccacgaggcatccagcagctgggctctggcctccctgttcctcactgcagggtgtcctggcggtaggctgtggggacagacacaccgtatatgtctgagctctgctctccatgggcacacgaccaggagcaaattgtccaatgtcagtgagctccagaagtgcctcccatgaacagaaaagacgctgtcaggcctctcgtgagtccaaaggcactgggctgtgcagggactggcacagggctgggagctggcaggtccctgaaacaggagctacgctgacacttccatgattggtcctgggctctgtccccgaccccgcctctcccccatgcagagctgagggcaggggtggagtagagagggctctcctccccctcggggtctctttctgttcctcctgatttaaagcggctcagccgtgcagccagtgtgacagctgtgctcctctgatgatgtcccctggacacgcacagcctgtggcgtctgagcagccctgtcaaccccaggtgaggatgtgagtcttcactcctccctggaggcagctgagtcgaggtggcaggtgccctctgcccaccagctcggccttctgcctctgctcacgtggcccggcagtcacagccctgatctgtcagctgtcggctgagttgtgcaaagctgccccacatggagggtgacagtcacaggagggaaagggcaaggcaggagcctgaaacccaaatgcaacagaatgagccctctcagcaggctgccactgagaagccaggaggtctccagggagcccaggaaggaggccagggagggaggcatgcagcccagactccccctgtttagccctgggcctcctatccagcctgggagaggcctctggtggcctcaccgctcaaggcccatcctgagcccatcccccacacatggctggagggttttgacaggcatctccctctccagcctggcaggagtctgaggctcttagcagaacccccaggccctccagggtccacttcctgttctgggcgccctgtgcagaggtgggaccaggtggagcacaggcactctgcaagccttgcctcaccttgaagggccgagcccacctgtccttcacagccctgttcaaagggcacctcatcctggaagccttccctgatgaccagcccctctgactccctgcagcccaagggcttggtctgtccctctcatcagtcacttgtcacccagggtgtatcatgacttctggttgtctatgtctaagcataattttcttatttagttctttggttttcttccacccttttattgttgaaattttcaaacctgtaggtgagtggaaaggattgtacaatgaacacaaacacatctctatccaccactgggattttacaatgaatgtttggccatgttcctttatctctcccaccccccctctctcttcatccatccaccttgaaaaaaaaaaaatgcttgcttgcaatacatagtcctaacacagcccagaatgtaatttgcaattatcctgtccatggagctttggggcagcactcagccctgcttagagtggccaagttgggctgaccaaggggcgcaggccacaggcccagttgctccctcccgggcacacactgagcctagtgtctggctggccagggctttttggaagcctgagtggggaagaagttgcctggcagcatcagatttggaagcagctgctgtcagccttagctgtgggagaggaccccaggcttgccctgaggggcccatgtctagttgctcagaacagggcaccaagttggcatttcctgctgtctctcacagcctcagtgcccccaccaggcccaggctcttccaagggcagcatagtatccatcaagtgggtgactacgagagccaggctggcaccttgagcaggaagagtaggccaggcccagctggctgatgtcagcagtcagcgttgagggccttggagtgaggtgggcctcggagctcctcatctgaggagcatggttccctaggtcccagccaggagctgacatggagaaacacaaacccactaaggcctgcatttcccattttccaagaaagctggaaatctagatatttgtggttaatgttcaggcttttaactgcaggctcccattttgaaagcctcagaaagcatgtcggtaggccaacttcacccacagcccgccttgaaggtgtgacactgcagaaaggcaggaagcagggttcacaggaagctttccttgggtgcatggaccgggggcgccccaagcatcagcagggattggaatgcgtggggcctgggccaggaggcaggggtggaggccaatgcccttggcagctgcagacctgcgggaaccctggctggctcctgggtccagccgtcacctgcatgtgtcccctgtggtctttgggtcagggcaggagctacagtggtggaaggacacactccttgagcctcaggatgggtgccctgtggtccttgctggttcaggaagagcagaatatgagaaatcacctgtagttctctggaatcacagctaaaacagggcttctgtgatggattcccttgagcagggtcctaggtggctcgcctgccccacctgagtcctggccctgatgctgtgggtgtcctgcctgccacaggcacacagaaagacagggaggagagacctcgaatgttcagcagccctgaaggaggcatccaggcctgggtgcccagctgaggcatgagacatggtgtcttcaggcagcattatggctccgcttacacctgacatcagggagggcctggctgagtgcacggcctgcacacctggggccgagggagcaccacagatttcagggcaggaataccactctgagcctgccctgtgcaaggaccaaggcctttcctgagcgtgttggttcaggaatggtagggagagggtccttgagtgtgcttaaggcccagctgcctcctcctggaccctcagtgacaccagatgaagatttgacctagtggacacatagatgttggttcagacacagctctttccttacaggagcctctgtgaattcggttttgggggtggatctccaggaatagggaggtcagaggggaggcagccccctactcttcctcactcagccttttgaatgttgtccttgcagaaccctaccatgtggttattcatggaaatggctttcagaatctaaagaaacgggatgaagttatttgcagatttatcttcaatgaaagcactatcattggtaagttgtctcctctgtgcctctgagtcacgtatttcccacacaatgctgcctttccccacagccagccaagcctcccagcccttgccaaccattccctgtggaccctgtggggttagaggccatgaggacaagtggaaggaggcactgggaaggccggtcacccctcccttcatctgccaagtggggaagtaacaaatccatctgtgcctcaagagcatcttacatcagggcttcccactcagtgaggctgggtttaggactgggtctgcgatcacagctgcatctgcccaccttagcctcagtttccccttcccttgagagcccaggacccaaagcccacaaggctacttctaggaaatggtggcagccccggagatctgagcctgaatggccaggtgcaccagtagcttgcccagaggggtatgtttaccttgcactgagggaggatgccagcctgtaggcctgggccttggaatcctggctcaggcacacattgcctgtgtcaccttgaccagatgagtgttctactctgagcctctattttctcaatttaacatggaggcaatatggtgctggctatgtatcctttaactgaaatgcttgggaccacagatattttagttttcagattttttcaggttttggaacgtgtgcagtatactgatgtttcagcatcccaaaccgcaaatttgaaatctgaaattctctaatgagcatttctttcgaacatcatgttggtgctcaagaaatgtcagattttgaaggattttgggtgtggattttcatgttatagatggtcagccacagttacacctaagtaagcaaaatcacatgcgtagagcagttggttcatggaagggctatagtattttttttaaatctcctattatttggcaatagttaggcatcagggaacctctgtgatggtggaatggcctgaggaagcgcatagtccaggcagacactgtgccctgggtgctgggggtggggtgtgctcttccccactgagggcctggggtgcagttggatttttgcatcctccttgatcttcccaggtggccccttgatacattcatttgatctgatgttagtatgttcactgaaatctaattccagggccatatggtaatcccaggatgacttctcttcccccaagaggcttcttgacctttttcctcctttccatgagtacataggaaggggctgagcctgtcatccccacattcccactcatcagcattgtgtggatggtctcagggaattcagttttcattgggttatactttcttggaactgtcttagggactgagcagcccctttctaaggaaagctaatgcttactgagcacttatatcagatatcgtgccaagtgccttatgcacactatctccttgaatcctcaaagcagccttacagaaagtctttgtatgtgtcaatcagaacaacagagagtttctctctaaaagaaaacagtatttattcaggaacggtgcccggcactgggaatgtgtgtgccatagtaatgtgcataatcagggaggtaaagaagacataggcttttaaaggagaaatgaagattagggaattgttttaagaccattactcttgcctaaaaagatcagttacaagggtgacactagtccaaggctggacaggcagttcttgggcacatgttcctgtagaagtatttttttgtgttaagtctgcaatggcttttgtgcaaggttgtggtttttgcaaagtcttttgtgatatttttgttatcaggcatataggcataaaaccctctctttgtagcctttcttagccctatttgtcatggattttattttattttttaacacaaatgactccattttaattctgacaactttctcatatggatggagagctagagagaagcatgatggaagagcctgcccagggccatacagtccatgttgcagggcaggaaagcagacccaggcgatctgccttctgcctccctgtggtggcagctcctgggaaagggggtacccagcctacctccgtgagtggcattcagctgcctcctctgtgggcctgtgggtgtactggcttcccaccctggagcttaccatctacatctccatacacaggccagcaccgacgtctcacagtggggagcccatgccacagctgtgagcacctgcgtagatggccattctgctcctggttgatggctggcccaagagtaaaaagaaacttattttttaaaataattgagaacaacctttaaacctattttcactaataggaagagatccccggaacatgtccctggagtgttggccaccactgaacacgcctcccctgcacccccaactagatggcagtgtgccttccctggcggctgatgccagcctggaggtgcagttcagggatctctgtcctgcatcagtccctgtagggcagcaggggcagagcctggttctggcttctggaagcgcctggatgcaatttttgacaactgaaataacaaacagagagagtgtctctaaacagaaatgctatttattcaggaacaggacattgcaatggaaaatacatgccagagtaaactatgtgcatatttagggaggtggaaaagaaaagcagagaaagccttttaaaggaaaatgaggaggatgccataattgttttgaaatcatccttggcaaaaaagtcaataccacgggttctgccagtcctaggttggctatgcagttaatgggccctgggaagccggggtcctggcagccgagcccagtgggtagagagctggagccaggccagcaggcagatgcagcagggcccacgccctctcccgcacttcaggaggtgtgaaaagggtgtgggctcaggagtgagaatgttccatgtctacacattaccgaactctcctgagcccaccacactcccacaaaaatgagtaaatagatacataaataaacaaaaattggaaaacaaaattacagacttgaaaaaaaaaacccagtcccctcctcaggcttcctcatcttggtaaatggtgtcgctgtccacccagttgttctggtcaaacactcaaatgtcatctttgactcctctgagcttcctcttcacatccatcccaccagcaagtcctgttgcctccatgtgcaaaatacatcctggatctgcccaacctggacagattcactgcacaagaaataaaaccccaacccctttccagggcccacaaggccctgccccctgtcctgggtcacctctttccctccttgacaaggtcagcgagtcactgcccagagcattggcacatgccactctctcagccccaagcacctttacctgggatctttgcctggctggctcctcatctttttaatctcagctggaatgtcacctcttcagagataatttatcattcatggaagtttgcaacactacacaaaataacaagaattgtgcaatgaacttaaagaagccatcacctactttcaataattctcaacctgcccccacctgctttccttggaacccttaccacagagtattttgaagcaaatccctggccttgcattatttcatgttcctctagaccagaaattgtggctctacaagataggagaagtcatgcataatgaagcggctgtcccttcctctctggttccctcacctcctctggtcatggacatcacagcacattgcactctctgtcatctgttttgtcctgttttttattttgttttctgtgtcccgtgcaatccctaaaggtgagtccttgagagcagggactctgcctgcctgttcctgttacacaacagagtgctgcacagggcctgggtgtggcgggtgcttgcaggggtctgtgcaataggaaggcagagcccacatgccggtcctgggccacagggtcagccctgcatgctgaggacagacatggggaggaacagtggacagacaggtgcactgacattcttctcatgtcattttcttttagatgaaaagccaaccagtatcgacaataattccatgaattgccctgggccaaaactagaaaaacctggagagtaagtgcccctggcaggaggctagagggcaagagaccagggagtcagggttgggcaccttgaggtgtacaaaatgtggatgccccccaccccctgctgggacagcacatatctgtggctgcgcaaagagcaccctcctccccacatcccttgttagtgacccccaaggtattcagggatctgcagcatcctagggtctgtgaggaaggcaggatgcaggagatgattgcccaaggaatggtacctttgctccaggttgcctctcagagttaagccaacacactctgtaaatacagaagagccaggatggtgacaccaagcagcagtccctggtcatttaggacgcggtcacaatggcatgagaccccatgcagggcccctcactgtctgacccacttaccctttggtcatcattgctaagtttacctgcaagtgtttggggaatgacctctcattacccatgctgtccaagggcaagaactgcatctctctggactggctctcaccatctgcattttctatgctttagggagtactctattgaagtcagcttgaacaaaggcaaaacattcttcaagagcaatgtcagcatcaccagcaccacatgtgtgagtaccagcatggggctgcaaacatgtatgaggactgtccagagcctctgcactagaaggagcacagaaaaggcagaccgttcccaggcagtcccagaaagtagcgtgtgcagcaggcacctgaggctgctccaacccggcttctggatggtgcaggtgggtgaggctgggaggctgtctgccaggagccagagtccagcacctctaggccaggacctcaggcccaggagccctggaggattccacacactgccgtcagggtatgtgtgtgctgctgaactggtgccccagctactgatctggtcctgaacctgctgatgaccctggcccctgagcctgcctggtggtcacttgctgtcatttcccagatgccttcagccccctttctgcctctcctccttgctcaggcccctgagatgtccctctctgctccctcgccaagccctgtagtatgtcccctcctgctgctgaaggggaggctctcaggcactcggacccgagctcagctccaagaggcccctgggaatggagatgctgtgccccaggtgcctgctcttcagagctccatgtctttgggcagtttggcccagggccgcataggcaggaggatgtgctggagggacgggcgggaggcctgagcccactccactgccttgtacccagtctcacttgtgaggacacaccagtgttgagagtcttccctctgggtctatccttgcctgtccctgcacatccatgcatggatctgcaggctgaatgcacgcattccccatcaggaatctacccactgatggcccaactgtgacagacacatcaggagcagccatggggctcccacctcgccagcggccttcatgctcagcctcagtggttcctctccttcagccagccgggttcccagcacaggcccctgccccttccctcccctcccctcccctcccctcctctccactcccctcccctcccctctccagccttctcttaagtagagctctggacatgaggaaggcctgagcagcctgccttcccacggatgccgcccaagattcctttattgcgaagaacacccagagaactgttcccgttgcttataccccatgtggccctggttctgagccaggacttggagctctctaaacctcacaagtgcccccagggagggcggctcattccctttgcacaggtgtggaggctgaggctcagagcagtgcgtggatgtgcccacggtgcagagcctggaagtggggagagaggctgtgggggatggacccgggtctcctgcccctgctcctgtgcctgcacctccaccctcacctgtctttgtaccggtagattttgtggtcctcacagaagccctgtgctgcaggcgaggtgtgcagtgagggtgggatcatcagaccatggaagcttccgggactttcttggcagggctctggggcagagactttcagcagggccagagaaagggtctatagctctctggggcccagccctggccgctggccccactgtagtacccggatgcggggccagctagggagagtgaggagtgggcagatgggccaccaagtggtgggcacggggaagaggccaccgaggccctcctatggtgctctctttctccaccagggcattttccgcaactggctctattttgtgccactcctgctgcttgtgccactgctgctgtgttgtgtctggcggctgtgccgcaagcaggcaagtgctccctgcccgcccagctctggggcccaggcacaggcccaccctctgagggactctaacatgtgactgccccccgtgatcccgcctgtgggaagtttccctcagctcccagctcatcacgtgagcccagggagtcgcagacctgtccacacgttcccagagcctagcaagcctgggcttctgcagggcctcctgccccgggctggccacagagagctggcctggaatgccctggacatggggttgaggcctgccctggctcctagagagaagtgaccccagaacccctgaaaccagggctgcctcaacaatccagacttctggaagcctcagatggacaagggccaggaggtggcctctgtgtggagggaggaagagaggggcccccatgaggccctgctggcccaaatggaggacgctgtaacccccagctgtctgtaccttgaggaaccagtgtggatctcggcacatgtctagttccttccccattccttcatctgtctttactgagctccagcttcccctgggccccatactgggctgggcagggacagaaatggtggctaccattccccacaggcagctcacagttctgtcctgtcatggctgagggtgaaatgtccaccccacaggagtgggaagggctccctgtaaggcggagcaggacccaaaagcagagatggagcccggggcagggaagatggaaggggtgctgggagctggggtggacggacccagctcagagagctgcagacagagaacagagcagaaggaggagagcgcagagctcagcccagggaacacacagggctcatgtctgcatagggagctgcaaggggaggaagcccgggactcagccatgaggctgggaggtcagggagggctcctgtagacagacaggctctccctaaggaagggaagtggggcgaacgctgtcttctccatgtggctgtgggcagagaaggacacttgtaggggctgggcctcactagggacctggtccctggcctggctgacccctaggaaccccacagcggcggtacaggggttcccctttggtaaggttggaggctgaggcccaggaggaggagcctgccgggtacaagttcacaggctcagggtggccagagtgacaccccaaaggcagtgctctgtcctggtgctccaggccagggtcccagctgtgtgcagggccaaggcagagcccgcccacccccatccagcctgtgtttgtctcttttgaacattctagactgtcaaggagccaccacctgtgcagaagccagaaaaggtaagttgcagttctggtcccgatattgtcacatcccaaggagcccactgaccttcaccaagagtgccatgaagcctgcgccccatgatctccatctgcttgagcagagaagttgacagaggggcagaatggagcctgagaagatgggggactcacagtgatgtccccagcatgccctttccgctccctgcaccccttaacataagccttgtcaccagttcgcagcctggggtggccagtttcagcaactgtgatgatctgtcctgaataaatggggctctctgtcaaggaccttttgtaagatgctaaggacagaggcgctctggaaaaggagccccgtgtttcagggacctggccctgtccccaggctctagaggcaggtgtggctccatttggcctctctggatccatgtctcctggcagggacgaggggctggctggggttagcctctcaggactgcagggctgagggatgggggagtcctggtgggcaccgagctgggaaggacaccagcccagtgagcacaggggccaggagtccgggaacaagttgtggctcacctgggtcggggacccaccccaggggccatgggcagtggtgagtagctgaggcaggaggccctgggcctgggatggggtgggaacaggcaaccctggccaagggtggcctctgcggtgctgcagagtggtctaggggaggctgcatctgcaaccaggtggatacggacagtcacctgcaaatgctgggaccattgcataacccccagggcaggcctctttcaacaagggcagccacgggagaaccaaggggacagagacaaagtcgttggcatttacgagaagagccatgtctgccaactaggaggagtttgcgtgtttttcacatgaaggaccctccactgtggtgtgggtttctttctggtcctttcattccccagacacacatctgggagtggccagcactgtgccctgccagcactgtgagcagacagttgtttttctttttttaggagccagagcaggaaaaaccaccatcaccaccaccaccgcctccgcctccaccacctccactcccgcctccgcccccagctcctgtaaacacctgccccactgtgattatttgttgctgtggatgccaaggagtgggcgggatgagaaggatagaggtgagaagggcacagtggagaggggctgtgaccccagcatgggactgtgggaggagggggcagatgggtcccactgtggagacctgggccctggaggaaggcaggctctacaggggctggactttggacacttgatgtcaagagcaaccagatgcccacctcaccctcgtgccccagtggcaggcatatatgagggctcctgtcccctgcaccaccgggtctgtccccacacattgaactccctctctagaaggatccatgtttctgtacagtggcagcttttgatgtctgaccagtccctggttcccacaggggtgcctcagctctggcagtggcccctggctttagaccacttgcctgcaggcgcatgagtcaagcaacctgagtcacaaaaggtcatgcagatcagaaaaaaaaatagaaatgaccagtcctgacacatgttctcaccaccacgaacactgcaaggatgccaggggcacctgccagcccgggcagcagaatcttcaggcagtgaggaaaagctgtcactgagtgggcttgtcgcctgctgagatgggctgacaggtgctgcagggaggggaggaggtggaggcctgaaagcgccctcacaagacacctgtgcaggagcttgagccccggagccaacacaacagccactctccctgaggaaacctccttcacgggcgggtccagggcccatcttgctgaggggaaccctgccagacagcagcaggggaccctgcacaggggtagagagggcgcctgggtggctggtgttgagggagagggaccccagagttcctacctggctctgcccctctcccccttggtcctggctctgtctgtggtcggatctcttgcttcctcctgggagggtcaggctcctctgcagcctcagtgggcatctggggaagccaggcctgtctctcctcagagtgtggggcacatgtctccagggggaggaagtcacctgccagcggcctgcactgccttgcaacacacggccctcatcccatccccaccggagcccagaaaggcctgactgcagcgccgagtggccaaggggctgcccgccgtgggtcctgggctgctttctggcctgtttttctctgccttcctcttctctcttccctggtgtcaggtacctactccctgagcagggcatggtcctctcacctgccttccccttgtgtgccccagcagcaaggctccttctccctgcccaggcccccatgctgggcccccaggcctaactcatgctccccttcaggacctctgctcagaaccacaggctcctcctgtctttggactttttatctgaatctgcccctggcgttttctcttccttcagcaaaatactgttttgttctagattccaaaactctctgtggccacagtgaccatgtccccagcacacaaggctgccaggcccctcccccagagggggatgggagctttgtctgggtgttttcctgggcacagagctgtggggggctggggagtcctgatgccttctggaggcagtgtccaagctgcatgtcttcctcatggccacgttgcttttcagggcaatctggataccttttgtgacctctctcacgcaagctgccaccaggtgccatggatgtgttgtcagagcagggaccaggtgagctagggcacagggacacagttgatggacaaaaggccactgcttttcccctgaccactgtcctctgggattggggctcagagagccatgtcaggcatctgcaaaagaggacggcacaagacacacagaaacggtgcccatgggcatcccagccagtttctggacatggcatcaaagctcttcctttgttcatcacctggggccaggagtgctggctaggatggctaacagagttgttgggcaacagtgactggttctaacagggaataaggattccttccttggttcattgccttgggaccatagggaggaccaaatttttaagattttctctttgtaacttattatgaatgaagactaataattatataattattaatgaggcctcagtaatgtacgcagtcctcccatgggccatttgttaggctaagccatgctttcactgtttttatcctcccagtaactgtaccagtaggtgctattattatccagtttggtgaaggggacaaaagtgctgagatattaagtagcatgtccctgctcctaaagcccacgagtgatagggctggatgtgaactgggctgactcctgcccttactctgcactgctctccttttggatcagcaccaaggggcttctctgcttaggccctggggccctggagagccctgcttctggctcggcctgggactcatctgcctgtgcctcccacagtccagccctttgcacctggaagatgatttcatcaccagggtttatagagggacctgcactggccagacctcctgcatcaggccagcataggttctcagtggccaggtggctgtgcatggacaaggccttgcaggctgcaagcctctggatgctgctgataagaaatgggccgggagcccctgggaggcgtgctgacacctggcagggcactgctggtgtcagaggcatgcagggctcctccagccgctgggctcctggctctgtgcctctgcacagggctctcaatcccagccatgcttgcacagaagcccactttccatccgaggtcccataaggcctctccacgttgctacagcccagttccggtcacatggcactagtccagccttatgcactgaacaggtgagacacttaggagggatagagcttgacggccgagtgtgaaaacaggcacctcaagcagaggaaaggcaagaggtgggaaggttggcgtgggaaagggccagaaatggccttactgtccagtgtggtgagacaggggatggagcaagtcgctgaaattgtctcattcccaagggcagctctttgaagctaaggtttaggggtggggtggtggggggcagagtaattgcattacagagggcacttaccactgctcagggctctgccaggcccttgccactgtcatcatgtgaagtccaccttgcgattcttggaaaaggagagacaatccctgttttactaatggcaaaatagaggcccagagtggcccagagagttgcctaaggccacccagatagtaagtggctgcctccaggctatcagaaatcaaccccagatctgtccctaacccagggaggcccatagctgtggcttgtagacctaggctcctttctagctcttctgcgacaacctaatttgaccttgtgcttcccaactatagtcctgaacacccgactgagtgtcttgtaagatttctgtcggatacccaagaattcagacaatctggcaggagttccccgttctcctctttaagccttcggtgtgctggccctagggtctaacatgaatcatgcactaaagaggatgcatccccttaagaccttcagcccgtttcagagccacagggtcagactgtaagcctagtcatgagtgtacagagccagacaccagccaggctgctggtgagctcagcagcttcctgctcagagacactgggaatgtgaccttcctgcctgagccaggggtccctgagtgagaagcagccctgaggctggaggagagagagtgcatctcagtgagaacccgctggagaccaggcttggatgggtggctcggccccagccaggcagcccaactgcaaccgcacggctgtggaggcatcagtgagacgtcctgccaggacaggcataggctgtctgtctcttcactgcagagtgaagaggccacctgtgtgctgcacacccctcttccaggatctcccctcagacagggattcactcaggccctcagcaggttgggggatcctgacagaaccagtgcatgcctctttctccacccatgcccggccttgtgaggaggctatttccaaactcttcttcctgacttggcattgtgggctgacctggggagtgtgataagctcgggaagttgatgagcctgtttgactggaatgtgctgtcgaatttagaggagctgctgccttttaaaaccttgtttagtttattgtttcagcaaatccaaacatttttgcattttggcacataataatgcaggaaattctccaaggctcagtttaccaaaaacctcagcatttttgtggcaaaagcagtcagtcttgtttaatttcaatttttgttttaaattgagtgtgtctccctgctccatcaccttcagttccctgaataaattttttgatagtgtcctcttccaggccatccccactacacacttatacaaaatgaagcagcacaactccgagtctcttgagccaaactctacctcccatccatgctgaggattctccttcaccttatcctgtggatactcattatgttaatgggaaacaatatcactcgatccatcaggaaagtcaggctaatagtgtgaaaccttactctctgtcaccaaatatagtgcccacaatgatataacagcctttccagtgagtttaattcgtgtgcgcaccacagcaggaggccctttagaaactggatctcatttcattctcacaacacccaggaaggctcatagctgccattcatatagatcttaaggtgggccagacactgttgcaactacattccacaaactaatatatgccataactctattgtggggaggaagctagaggccctacaaagttaggtaacccacccagggtcacacagccaggaagcaataggaccagcatccaacaacctggctccaggtccttactgtgtgcatggccacctctctgtcctgcaaggtagtcactactgtctgcatttcagagctgtggacaccgaagctctgatgtttagtgatgggctcaacatggcagggttgttgagtggtagagccgggttatgaactgacctgaggggaggctcatgtctgagtcaggttccaccccatgtcctgctgtcagagtgatctatggaacacctgcaagtgcatctctctacagtgcaaaatgtcacacggcaggtcctcaaataacgtttcattcaacgtcatctgaacaccgagtgagaaatgatgatgctgatcagaaaaaaatccattcccagctgaggccaatgtctgtgtggagtttgcatgttgttgctatggctgcagggaatttttctgggtacttcagtttctgcttacatcccagagatgtgcacatcaggtggattggcgtgtctctatgggtgctgtgtgagtgtgtgggcatgtgagtgcacactgcaaggacatgacatcctgtccagggttagttcccaccttgcaccctgagctgctgggataggctccagcctcctgcgaccctaagctggaataactgagtaaataattatgttatttgcttttattaacttttcttaaaggtgtgtatagctcacatttatttcaatgtttaatattagaagcattttggtttttatttagaagtttgatgatgccttcatgactagatatatgccacaggaccttaatttactaatatcaattaatctatgatccagtctgttttcttgtacactgtttcactggaagtcatgatttccaagaaactatcaacagcttctaatgagaatttactgaaatttacacatgatacatttgtgaatattaatatcttgatttcacactgtcacttgcagacctccttctaaattcgtactcatgtttgctgggatagttgttctgggtaacaattggagcttaatgcagacgggccttaggatgcattcatgaccatggagctcctgagttctcctcctggccatatgcccgtggagggcactagaccaagggacaggggtggcaaagccaggctggctgtggcctccaactgtccaggaatcccagcttgcagctgttcttgaagccagtgctttttgggaaagtttcagatcataactttggtattgcaattacagagagccttcccttcgactcctcagcaccacccctccaaccccaaaacacatgcacacacacacacacacatttctgtaacataatcgggaaatacaaagattgagccaaaactccaaagcactggcaattaaggtttctgattgtttgccaatcacttcaggaaatgtccctttaccttagagtggttgagctgatgtgagaagtaattagttgctggcttagatatctgcaatcagtagagaggcagtgaggaaggagaccctctcaaactccaggaacctcctcaccaccttacacttaccccacagattcagggggcagccacctggaggtctcctctactgtgaggcaccccaaccctgctcctcttcatcagtgcaagtgtagacccatacctcagagctccctggatctcctgggatagactggggcagaggaggggaggtggcctcagtgttagtgcccggggtcctgctccggaggatccctcagcagtgggtaaacactaggtctggaatgattgtggtaagtttttactggaatgttttgcaataaataagtagaaacaaaggaggtggaaataaacatgaaagattcctttctctttacaatagcaataaaaaacaaaatacccatatataagtgtaacacaaatatgctgacccatgatgaaaagaaactataaaactttacttattggtacaagagaaatttgaaaatataagaatctagagcacaatgtcaacttttcccagaggaattcatgagcttgctatgttattttagtgaaaattgtaatgaaacatttttagggaatttgatcaaaacgacaagttcactcgaaaaaaatagacagttaagaatcattaagaaatttttaatacagaaaagcagtgagagaagacttgccttatccaatgttaaacattaagctccaaaaattaaaataatgaaaaacaagaggctgacaaaataatggccccaaatcgagcaaacaataaatagagtatataattgtggtgatagcccctggtactgacagtgtgtatgcaggtgagctcaagtgcacttatggatgtttaaggattgtttaacatatgtcaaaagaaaaacatcaggcaaattaaatgtaacggagttgaattgagcagaaaaaacaaaacatgattccaaatagggcagccctcagaatcaggacagactcagagagtttccagggctaccacagggtcagataagattttggaacagaaaagggaaaacgacatagagaaaacggaactgaggtacagaaacagctgaattggcaacagctctgtgtgtcctcatttcaacagttggctgctgtgagtggctgaagtgtggctgctgtgaatggccaaggctcagctcccattatagaagtatactccgcagttgggttttcagtttgtttatgtactgagttaggctgtggttcatatgtgagaactcaagtatgtgagtatggaggctttctcaggccaaaatttagttttatttaacaatttcactcttttcagtggcctctcaatttggggaggttgaccaaaactttgggcattgatgccactctctgtcaccatcaaaaatgagttacttgatctcagtatggaattcacaagtcacaacatcatgccacttcaatacttttgtatgctcttgctgacttagtagaagtgagaccacttatgctcaatggatggttgcatacaacacatcgaagattttagagggttcagtggaccacggggactattaggatgactacaaagaggatgatatcaaaagaccaaagtgaactccttaacaatgtttcttatgaagcatactgacccaaatcaatcaagtcaaggttcaggcagtctaggcagctcaacagtgtttaagttgattagtcatagtctttgttcagggtgtacaggccataattcactgtaaaatggcctgatttgtagaggcattcatctttgttgttagcctggtaacacaagcatgatagcctggaaagtcgctagaataaatataaagattagaaaacccaagtttgtcatccaccatttaggatgcctgcaaaccaactgtcagttgctcccataaacacattatgtgttcctttctcttgagagattttcttaatgtatttggtggcagagtctaagaaaacagtaataccagccagccaccttttaaattaaactttctgtagtaacaaaatcagaggagagataggtgtaacattcacttgtgttcaataccaaacacaagccctcaactgtagcaaaaaggagatgtgaagctgcatgatgttccatgtgaatgtatatgtcatcacctctcttttggagtatggcttttactcatggttcacatctggctatttgatatggctaactcctgcctttcaaataccttcccatgaaagttcccatgataggtcctgtgatcagaagcaaaaacagtcaataactgaagttagcaccaactttgaaacagacaaagagaagctagtttctactgagtaaagatttcagttggtttcctgggggctcactcttgctggtagtggggaacccactgtatgaaatttagagctaatcattaaattgggaaaattcttaaattttgtagccagacagacctcccaggagttcagcataatggaataagcacattctctactgacccaatataggcccttaggggttggagaagtgtccatttagttgtatttgagcaagggtttgttacaattgttcacccatggccgggtgcagtgactcactcctgtaatcccaacactttgggaggcctaggtgggcatattgcttgagtccaggagtttgagaccagcctggccaacatggcaaaaccccatctctactaaaaatacaaaaattatctgggtgtggtggcacatgcctgtaattccagcttcttgggagactgaggcatgagaattacttgaacccaggaggcagaggttgcagtgaaccaagatcatgccactgcactccagcatggggtacacagggagtctttgtctcaaaaaaaaaattgtttgcccatcagtctgcataaaaggaagtttgcttttttgtacctcccttataatatgttgtaaaggtatataaccacatttagtttttaaaaagtaccctactgaatttaatctggtgacattatacaagcaattacttgtacccacgtagataattcccaggtcttgagagactagtgcctggaagccaaatataccttttgcaggtatcacttgaataggttttgtatatttggtaacaatcaggttattaattggaaatgttagagtgttgtttctagcaagtgcaggaaagaaagtagcaattatgtttagtgtatcaaggacaactttccactcatcctttggagtttcaaggtgattctctttgggaacgtagacactggcattaatggaattgtttcttcatttttttggttttagcccacaaacccaattgctcgggttttatgctggagcagaagcttgagctaaagccatccactgattatggtcccatgaattttcctgtagagaaaaggaaaggattaggacagcaggagatgaggggaaaagacaaaaacttaagttttccatgatgtcagagaaatcttaatttatgatctttgaaaagttgtccatttctaggatgttgtctgcttctggggagaaatttctctcatcaggtttacctgaaagtctgcaatatatatacagtcccaagagtctgaaggggcctttctgagttgtgaaatgcagacccaaggtccaaggccctgaagcctcactgcagtgtgggtggtgacaaggactcggtatggtcccttccaatgaggttcaaagcaattttcctctgacataatttccagaagacccaagctacagattctacaccatgaaaggtttgattatcctcagtcagtgcatcataaaaagcttcctttacctggtgagaatacactttgacataatgcattaaagccttccaagtttaagcatatcagagtttaggagagtgggagaggcatgcggttctgttactaggggcatatgctttccagtgactatttcgtaaggtatcaacttatgttttccagtaggagcgtatctgattatcatcaaagccaatgatagtacctttggccaaggcaacccaattgactcagttaactttgtcaatttgagttttaagatgtcatttgttctttcaacttttccagaagacagagggctaaggacaatgatagtgccatcatgtccataatatcttaagtgctttataacttgcacagtaaaatgagtttccttattgctggagatttctccagcgagtcgccagaaggaaacacattttctgataatttcttggctattgtcattgaatcagctttcccacatgggaaagcctttactcaaccagaaaacatacaaactgctacagggacatactgataccccgttgaggttggcaactgaaggaagtccatctgtaagtgtccaaaaggaaggtggatcacaaggtcaggagtttgagaccagcctggccatatggtgaaaccccatctccattaaaaatataaaaaattagccaggtgtggtggcgtatgcctgtagtcccagctacttgggaggctgaggcaggagaatcacttgaacctgggaggcagaggttgcagtgagccgagattgcaccactgcactccagcctgggtgacaaagtgagactccatctcaaaaaaaaaaaaaaaagaaattgcccatcaagtggtgaaaatatactacctgaagtttttattgttttcccaggattatgagtttgataaaccaaacattgattataaaccattttagcaactttgaaacagtcatcccaccagtatttcttcataacatggattctgtttcaggacaagttgtgggatgcagagcttttaatagtagaagcttcaaagactcaggaagggccaggcagccatctgagccctctgtgagtctatgcttaacattgaatttacatcctttagataccaaatttgtttttccaaatcaagtgcattgcagtgtttactgagtaggtcatcatgagagaattgacttggatcaatcttatggagttaatttaaatcgtatatcctaatagtttcagcactagctgatttggcataaataccttctagagcattccttttatattcaggttcagttttacaggtatgagcttcaatcttaataatggccatctctgatggtaaccaggtagcagaaaggagtttatctatttggagtccgtttatttaatgaggatcccactagaagtaagaaaccctttgttgtttccataaatgccaaaattgtgtactactccaaaagtatgtcttctatttgtgtaaatatttactgacttgtccttagctataggacagacttgggtgagagcaaaaagcctgtggtttgagctgacttaagttgaggaagaattccctcctctattagctcattttgggtggtaatggcatatcctgcctgatattttcttttgagtttttggcataggacctatgaacaaaaaaataataactcaggattagccaatgtactgtctcgtaaattaacgcaagaggccactatttccaatactgcacttacacaattgtggtcatcaccagagtcaggaagagttaatacaatagcagcgttaagtaggttgcagcattttagatggagattagaagacatcgggaagaatttcataagatgctagatggcttgctgaaaaatgctgtgtttggttgaaacttaatagacttttcacagcatgttggacttgtgaattgagttcattccctaaaacaagctcggatgaagcttccaacttggctgctgctacatctgcttttaaatgattagaatattccctaactactgggtctaattgcagactggaatatgcagtgggcctatgtttcccccatgttcttgagtaggaacttctaatacctgattgttgtgttcatgaacaaccaaggtaaaaggtttagtgtagtttggaagtcctaaagctggaggctgtcataaggccagtttcatggttaaaagcctggactgtctttccgaggtaaagattcccatactgcatttctagtgagctaaaacaatggtgaggcaattaagggaaaatttgcaacccaggatcctcaatatcctgtgagtccaagaaaacctcttaaatgtcttttggttccaggccaaggaaaatgttgaatagttttgaattctcccaggtgaaagggaaatcccttcagcagtcaagtcatgtcccaaatagtgaaatatttctcttgaaaattgaagtttttccatcaaggccttgtgacctttatgtgtgagttgctatagaaggtaaattgagccaatttcagagcactgttgagtgggagagcataacaggtaatctacatactgagtaacagtagaatgtccagaagactgtagggttattaagtactgaggcaatgcctgggaaaaatagaaaaggccaggtgtactgctgatttttctgagtaaaagcaaacaaatgttgactctctttatgaaccggaatgttaaagaaggctgagcagaggtctattaccatgaaccactttaaatcagtgggtacgttaggtaataaagtatttgaattttggactatgggaaatcttggtattataatcttattaattagctgtagatcttgaacaaatcttcaacctcatccatttggctttttaactggtaggatggaagtgttaacaaggactggtacatggaattctaaatcctagtttagttaaatctcctacaattgttgagagccctttaatttcattaggttttagcgtatattggagtaatttaggaaagacttagaataaccagtttggacctttatagacgccgcacttttaattatttctgtatcatttgaggaagagacccataaatattcaggtgttttagaaaggtgtttcattatgggcctgagttttgatcttatcgatttgtctgtagagagcataaccattctggttcaggagagtcaggaaactctacgattgcttctccctctgaggagaattgtatgtgtcctttcaactctgaaagtcctaccctggcaagtttactggatcactgttacatagtagaaaggtatattttcttgcaaatatcctcaagttgattaggcgggttcagatatggaagcctcttgaacttgattcaaaaccctcaccacagagatgatcctttcacgccaagagatttgttggctttttaaagtagggtttatgctggataaggcgaccctggtatacaccagcattgcacaggattcccagcttacatcttgtttttctatgtttatttaagggtgttttggggagagtttactagagaatccctgagccctgtctatgtttattattctgagcattaaaatctcttgggtcccctctagtggtgaaccagtccagcctaaagggaggagccttggtggtagactgagacaaaagtcaacaatctcctttcccagtgtcctgggtgtttgcaatgaaggcatctaccttggggtaaggaattccttattctgcacctcttgcttgtgatttaaaataaaaatgagaaggtccctttggtcttggcccctgtaactggtgtaattggagaggcataagattgttagccttttgggttttttcttgctctagagtcttctcaaaatgttcagctaaggccaccaattcagtcatgtctgtaactttccatcctggcttatgggttttaattgaactgccaagttcaggacggagctcatttgtaaatacagcagttaatgccattccagtctctgaaggaaatactccttgctatattttgagcacaaaatatttcagaaacagtgtttctaagcaagttctgtaatctgaaactggttcctcctgctttggtctgcagggttggatgatgcaccaatcaattttttctggaacaatcttaggaactgaatgtaaaatgtgttcagcattttctctagctccttttacctcttctcatgcaggggtttttgagggtctttaatatcctcctcaggtccaccccattctgctgctgccatccatttcttagcttcaccaggccccaatattatgtgaataaattggttaaggtcagggagccattcgaaattcctcagtaaacccttgagccttcacccttgggttagggaagtcctttacagtggctctaagctcagttttaggccatggagtaaaggtatttatcacaggaaggcctggctgatcagaaggtctttctttgtaaggcatctgggttttttttttttttcatcttcatgctaaaagggttatttattaaaaatgttagtggactcatagtatgtgagtagagatggataaaaagaggaatagctgtgagtagagatggataaaaggaaggaacaggggctgggcagggtgactcacccctgccctcacccagcactggtgttagggatgatggaaggcagggagaaatgagtggacagcagtcagcaggcccctgagccccacagctggcacttcctcctcccacaaaaatgaacggaggcagcccctcacaacatccccacagatccctcaggctgggtggcagtgccaggaggaggggccaactccttctgggagtggcattatcctttctggttcccgccatgccttctaaccatgccagaagagggtttgagcacaatggccttggctgcccctagggattgctcagaggaaaaaaggttgggggctgaggcctgagtggacagaggagagcactgaccagaagccaagatcttgcctgggccttatagtctgggtggtgcccaggaggagtgaggtggggcttcaagcccccatgacaaagccacctctgtgaggcctggactgtggtccagcacatcctgatggagtgacctgcactctgggtccagtcggcttgtggtcaggagggcagtggtgggtggaatacagtgctgaaccttcttgagccccaaggaaacgtggagaaaacatccgtgttcctccaggtggaggtctgggccaagcccatagactctctggtcgctcttgctctgggtacggccttgagctttgtgtgtgacctggggcaggcagggtgagggtgctgttatgtgaagggaccccaactctgtgctgcaaggagagagacaggctgtctggagaaagagaaagagattcagctctagtgctctggggctttgggaccaggatgctccccttcaaggaaggcagcttgtcagaggcagcaccagagctgaggctcaggatggctgggcttgggcgtgcaacatggagaggtgaggagcagagccctcaagaggagcgagggagggtgccagggcatggccagctcttctagtagctgggctgtgattgcctgaaggcagggtatggagaccccaggaacctggcaggggacggtctggcgtgcaggctgggtggagggactggatcctgccagcagtgcagagcttctctggagggtgtgagctgggagggaagatggtcctgggaggactagatttggggatgggtggagtcagggagagcaggctaacacacttggattgtactaagaaggaagcctgaatccctgaacaggtggcaggagcccaatcgggcatgaaggagggtggacaggcagctgcagacacaggtggctcaggacagggtctgagggggcacaaggggaaagtcagcatcatcctggatggggactagcagggcaggggcaggagagggcaggtcacaggacggggcctagatgggagaagggcccctctcagtaagagagagaccatctctgtaggggaatccagcatttgaggcatttgtcactcacatgcccaaggggaggctttctgcatgaatgacaggttcaagcaagctcaaagtctgcatggtctgtggaacacctgtgaggaatggagcgtttccttgggaccatcaggctgagactggcctggcaggagacccctgggattccaggcagccgggaagggtggccttgagtacagaaggagcagaacaggccccacgccagggaaaccacaagcattgatgggctgctgctcctgccctggtatgtgggcatcatcagcgccacatcacagatggggaggtcgaggcaaagtagcatatgcccactggcatcctgggatcctgctgcagccctccagccacaggtgctgaaggggatgcagttacagtcctcatgcttgcagagcagggacaggcacatctagaaggacagggcacttcccacaatgggctcagctttctgccaggacatgactggaaataccaagcagggtggtcactttagctgggagcaaggataaggggcttcctggaggaggccactctggagctgagtctgaaaaggtgagcagcagttcactgggcagacaaggttaggaagaacattcctgaaacagaggacagcctatacaaattgagaaatgggagagctgagcagctctgagaaagattgttatctaattgcctgcctgctaagccccaagagaacagccttggggaaacctaacaattctccttgaaaaggccaggctttcaatttgctttcatgcttataagatggcttctggagctccagccatcacactcatattacaggcaggaagaagaaggaaaaagggaaagcagccttctttaaagcaatgtccaacaattcctatttatactccattgccagaatgcattcacatggccatgttgctcagcaagggagactgggaaaaggtcattttacaactgagcacattgcctctctctttttttttttaattttaagttccgggatacatgtgcaggatgtgcaggtttgttacatcggtaaatatgtgccgtggtggtttgttgcaccacattgcctttcttaacaaaagcaggcttcgttagtaaggaagacaggaagaatggacttggggtgaccaatctgtgtttggtattgctgggcccatttaagagatgggaaagccattcccaagaggttgagtgacttgcctgaggtcagaggctagattgaaccccagtccctttgaccttacttatagtgaccctgagggcctttttgaaaggccctgatcaagtcttcagacagggttgccccgatcatgagcataagaagccagcagagagaaaggcatcacagatgaacacaaagacaatctctgtgtggcttgcagctgtgtgggtggtgcctggctacactagtgtgtgcccaagatgaaagcaaagcagctgcttctgcaaaacagagtttgctcttcctacgggtctggatcatcctcttcccaaaccaagggaaccgtggagctgctgccttctcagctcatcacccacccaagggtccctggagccagccttgagggctgtggtgagcactcatcccttccacatgctcactagagccttctgtgccatgctggggcacagaggtaattggggcctcctcctagctaccagggggaagcaaacaatttcgactggagggctgagggagtccagagtcagagacccaaggctgcctggagaggaagaggggactttgaacgctggagctgagtctggaaggaggagtccaggctggaggcagcaccaaggggagagaggaggagcacagcaaggcccaccctgtgggtcccgatgggtcctggccccatccctttgagccaggcaaccgcagccttctgagcccagttcgaatgccatcacggtgaccttctctctcttctcttccctacaggggaggtacctcagcttagcccttgcacagtcccaatatgcacaggctccctgctgcccaaggatctgctttccacacagccaggagtgcctttccctaccacaggctccctgcagcccaaggatgtgcctgagacacagccgggagtgcctcgccctcaaacaggctcgctgcagcccaaacatctgcctgagacacagccaacacagcagggagtgccttgcccgcaaacaggctccctgcagcccaaggatctgcctgagacacagcccggagtacttttcccaagcacagactctgtgcaacccaaagagctgccttcaacccagccgggagtgcctccccctcacctgctcctccaggtgccgcctccccccagctaggtgcttgaggcctccctccaggatgctgccgctgctgtccccactgctcaggcacacggcagaaccccctttgtcactccccccgtcagagcccaacttctaaggcaccaaacacccaagattaacaggcttttgttgctgaactggacatatacattgagtcttttcttgcggtcaaaggagttgaattcttgctgatcaactaaagttgattgtgtttgacaccagggagcttgtcttttgagtgagctggatttatactgcacctgccacgacacagtgccctggtgccgtcgggatgccaggcatggatgcattccactcccaacagccccgaattcatctgtcatcaagggctgggacacatgaggtcttaggccaaattctccatttaaaaagctcaaaaagtgtttgaaatatgaattcaatactgtgtatccctgcctagctttttgttgttgttattgttgttgttgttattgtttgagacagagtctcgctctgtcgcccaggcccaggctgggtgcaatggtgtgatctcaactcacggaaaactccacgttctgggttcaagtgattctcctgcctcagcctcccgagtagttgggattacaggagcctgccaccatgcctggctaatttttgtatttttagtaaaaatggggtttcaccatgttggtcaggctggtctcaaattcctgacctcaggtgatccacccacctcggcctcccaaagtgttgggattacaggcgtgagccacagcacccggcccctccctagctttttgaaaggaaaaatacttgcatatctcacttcctgtactcatcttcttgtccctggtttccattttttggctactcaaattctgaatgtgtcccagaaggcagtgaggccctttctggaaatgctaattatcttcccagataccccacaccatccccaagaccaggcaaatttcagggaatcctcctcatttcacgagaaaaggtaaacttccctccttaatcatttgtccccatagaagaaaccacagccccaacagagatgagtgtcaacaggcagtgtcccaccgcccactgtggcacatggtggctgcatgactgcccaaggtgccacccacacaggccatgggcaccccacatggggctcctgagcaagtcaggagaggggagctatggctgaggttgtccagtcatccctaatccatctttgagagtaaataaacggctctccacctcccccatctactggaatgcaatattgatgcttttccacagaaattctgaaagacaagtacaagttaaaaatataccagatttggattttaaacagtattgactaatttgacagtgataaccacactgtcccccctcccatgtttgtttgttcgtttctttgttttaaggcttcaacgcaatgtcttgcctctgtgtgtagggctttggggggctttctctaggtcacatgactttaaccttcagtgccatcatcctgaggagttactttttcttgtcccccttctccgtcttgcaccctcctgtcctgctgcagcctggactctgcatctgggtcctgccagctgccatgatgggaagcctgcctctcccacccttccccagcctctcccctctgtgtctgcacatctatctcccaagctggttatgagaggctcttccaggcacacaatgccttgcacaaggcatccagagaaatgagccaggtcaatgttgaggaaatggaagaggatgctagagcccctgggggtggacgggacctagtcatttggtttttccccatttggaggctcattccctgagcaactgtgggtactcgagaacatgctgcccctccacacttcacttctcaacgttcttcctggaatgggaggcctggcttcatcaatttgttgtcttgctttgttttttagagagtttttgtttcacaaaacaaaacacctctggtcctgtaaatacagagatttgcacaaagaactgagcgttcccacttcattgctagacaggtggagatatttatgacaagggcacctggtgcctggtgagcaggtgcatggcctgtgtgcagcgcaatgagacagggtccagagaggtaggatgcatgcccgcaggtgtggaagggatagccagccagacagtgcaccctctggctctagactgtctggcccagctgcctaatgcctacagccacatacaaatgtgcccagggcagccaaggcaactttacaaggtgcctgggactgtgtatctctcaagactaagggagaaaatgttcactgtattcatgacaccaggaaaagtgtgggaaagctttcattaggcagaaagggagttgaaataacctgaaagtgtacagagactttatttcttctgtgttacccatgtggaaacatgaagatgttgcttcccgtccctgcaactctgagaccccataggaagaaatgtatgtgcaatttcatgaagagctttatgtgatcctggggaaatcaacatacttgtttgttaagggggattgagagcctttggagtttagccaatatgaactcaagctagggcctgtcatccttcctcatccctcaagggaggaagtcatatattaagaaggtgagctcagaagtcatcacagaggaggactccactgccctggccacccacagggaccctcacaggctttctgtgttggacagtgatagcagaaatagctctagtgtcatatggtcctttctcccttcttgcttttgtaggaatccaaagctaatctgtccctgatccggattgcacgcacctgtgccttttggggcctttctgcattagttcttccttctcttctaacctcaaaaatgtgttttctctgttggctctttccctttaacatagaagtatactcacgcttttgttgaatcttgaaataaaaggcttcctttaccacatatctccctttaatactacatctctcttctcagccaaatacttgggaagagaagccctgagtttgtgtcattgttttctcacctccagttcactactttgcccactgcctgacatccagctcgctcacacacacacccaagcccaatcactaagttgccatagctaatttgtagctttcctgccttcctggcaaaatttgactctgcattgggataatacatgtcgagtacctattgaacaggcactgtgctaggtgctactgttatagatatgaaaagaaggcatcatctcctttctaacaactcacaggagcagccattcctgattcatacatgtctcttgactcccagtgctcacttttgcaagcttcacttaatgccgtgcaaatcaccctattctccaggtcttctttcttcccagttctccttactatacacagcttctcaaggcagtcacctccacactcatggcttcaattgctttctccattctctgagaacaatagaattttaaatggttttatttcatgtattagctttattttatacaaggtgcctcacctgctgtaaccatagattcaaagttgctccatgaaagtaataaatgaaaaatggtgattttttagcatgtaaattttaggaaatttccccagttacacttaatggcttgatttagtgtgtatgttatttttgaaaacatatgttgggatgtcacaaatggacttagcctacagagatttatattcaacttttgaccagagagttccattttaatgtgacactgagagtaaaaaactatcttttcctccttacctatttctcttcctacattctcggccaggaggaaggcactgctacatacccagtcttccccagcagagcctgagcagctctgttttccttctacttcccctcttctttcacatctcatgaccaagcacttcctattctgtctcccaaatgatcacagactttttcctccacttttgtcactgccactgcccttagcattactctgcctttagagaaagtctcttaattggtttggttgcttccttcagtctttattatacagaccactacacgcacatctgacagagacttttcacctttttatggttgaatgactgaaattcccagaataaaattaaaaccaccccagcatcaaatttgaggtcaaatagaggtgggtttgtatcccaggttcatatactgtccagcagtatggtctcagaaaactgacctccttaagcctttgtttgtgtatctgcctacactcattgagagttgggactatttcacacatatagtgcctggcatgtagaagggacttaatcaatgttgaaagaaggggaggcattttaaaatccacatcaaaaaaatgttgttctgttcgggagtggtggctcacgcctgcaatcccagcactttgggaggccaaggcaggtggatcacctgaggtcaggagttcgagatcaacctgagcaacatggtgaaaccccatctctactaaaaatacaaacattagctgagcatgggggcgggatcctgtaatcccagctacttgggaggcttaggcacttgaatgagaatcacttggacccaggaggtggaggttgcagtgagcaatgattgtgccactacctgggcaacagagtgagactctgtctcaaaaaaaaaataaaaagtaaaaaaaattcttttaaaaatatacgaatctggctgggcacgatggctcattcctgtagtcctagcactttgggaggctgaggcgggcctgaccaacatggagaaaccccgtctctactaaaaatacaaaattagccgggcatggtgacgcatgcctgcaatcccagctactcgggaggctgaggcaggagaatcgcttgagcccgggaggcggaggttgcagtgagccaagatcaggccattgcactccagcctgggcaacaagaacgaaactccgtctcaaaaaaaaaaaaaaaaaaaatagtgttcagcaaggttgaagcataaaaggttaatagccagaatcatttatcaattgtatttctatacatctacaagacacaatctgaaaatgaaattagagaaacaatttcactgggcaacaagagcaaaacttcatctcaaaataataataataataataataataataataataaataataatctacaatgtcatttcccatccaagcctgacttctacctttactttctgatatggttttgccatgcccccacccaaatctcatcatgaattataatccccataatcccgatgtgtcgagggaggggcctagggggaggtgattggatcacaggggcagttatcctcatgctgttcttgtgatattcagtaagtcctcatgagatcttatagggttttgttttgttttgtttcttgggatggagtcttgctctgttgtccaggcaggagtgccatggcacgatcttggctcactgcagtctctgcctcttgagttccagtgattctcctgcctcagcctcctgagtagctgggattacaggcatgcaccaccacacccagctaatttttgtatttttagtagagacaggatttcactacattagctaggctggtctcaaactcctgacctcagttgatccacctgccttggcctcccaaagtactagggttacaagtgtgagccaccgtgcccagctgagatctgatggttttatacatgtttgacagttgctccttcacatgttcccactctctgtgcggccaccatgtaagtcggacctgcccttctgccatgattgtaactttcctgaaggacttccccctctgccatgattgttaagtttcctgaggcctccccagccatgtgaaactgagtcaattaaacctctttcctttaaaaattacccaacctcaggtatttctttatatcagtgtgaaaacagactgctatactttctgatactcatgcttaagcaattggggaattcagactacctgggatcaaactatggccccacccttagcagtcatgtgaccttgggggggggttacttaccttctccgtctcaacaacttctgtaaaatctgtaacatgagattgtttctgagggttaaatgagcatagcacagtggggacactgtcaggcacacactacttgccagatgtcgagtattcatctttattgaactaggactgtggtaagccactttatggctctcgattttgtatgagaaaatcatgcttagtgccttgttagtaaaagaaagaaaatctgaaagtccctgccacggaaggaagaaatagcggggagaaaagggagttggtaagtttcagcatttcagagcttggaggggcaagttaggtttctattttatggagaaggaggtggaggcaggatgggtcctaaggtgtcattcaaaacacacagccataactctttattgagagtagagctagggccccagggattgctgtggtcaagttgcggacaaaaatgaccactcgttggaagacaggagaggagtgtttagttacaaaagcagtcaacaattcaggtgtatctatattcagacagcaaataaaagttgttcaacttggttgctaatgggacccactctactgaggctttgtgtagaactcgtagaggaagctggcttcgaggaatgaactaccctgtgcttttcttaggactaaaatctcaggaagctggtgatgaatgaaaaccttagtcccactggcactgcacgaggggccaggagagcagcagcatcataagccacagggtggggcagccaaggcaggggcattctgagctgttggggaggggtggcaggcagggtggggcactgtgagctgtcggggagggcattgtgaagtgtggggtggggcattgtgtgccacatgcctgggctcccacctggggccagtgggcttcagtctgtaggtgactacagaaggaggaggagctccgtctgttctctcttcaggcagttgttgtgtctctcagcgcttgttgggttcacaacctaataaataagccggctggtcttcaccctcccagacaagtcaactcaggggaggcagcagggtgcgggccttggcccgcagccctagccggggccggggccggggccggggccagggctggtgcccggggccgcactgtgaggtgggcaggcgaggagcgggaagaccatctctgcaagtgcagcatagcctcggcctaggacagcgggagtgcgtggccaaagctgtgagcagaggcacaggtggtggcagacagtagaggcgccccatggggaacatactgacctgtcgtgtgcaccctagcgtcagcctcgagtttgaccagcagcaggggtcggtgtgtccctctgaatctgagatctatgaggcaggagctaaggacaggatggcaggagcgcccatggctgctgctgtacagcctgctgaggtgactgttgaagttggtgaggacctccacatgcaccacgttcgtgaccgggagatgcctgaaggtaaggaggtgataggtgccatctaccctcggtttgcctctggctgctgctgtccccaaggttccctttgaggcatcccccacttcgagctcctttctgcttgtagccagctttcccgggggctggccaggaacaaaagctggctctgccttgaattcccaccccttagtctttccccaccgagtccagtcagtttcttttcacctcccctcccaatcgcccagttcttgctctctcatctcattctcccaggctggcatgggaccatttatttatggctcttgtcgaataagcagcagttgaataaatgagttgataaatttttataaatgattacgtcctttttcttttctccctctatacatatagctttggagtttaacctttctgccaatccagaggcaagcacaatattacagaggaactctcaaacagatggtgagacaacagtgtctgtagctctgtttattatcctgtgggactttgtttaggcctctttgagctattctcttccttttctcaataaaaactcaaatatcccaacttttcagtacccatcttaatttttctttgaacctatccagatggtacctaagtgaaggaaccaggtaagtgcctaattgtttcctttgttaaagtagccaaatctcaggacagttcctattcaaatatttggggatttcttatttaaaatcagaatggagtttgccacgggagaggctatatggtattcttaatgggctgctttaagtcaccttgatagaagctgcttagtttcttctaactgtaatttgaacacagaaggaaaaagaaaaaaggagagtgcttaaaataattgtgaaaggtgtaaaatgtcacagccggggctgcagaaaaatggttgtgtgtgtgtgtttggggtttctcaaaggagtttacctatgaggctctgattactttaaaattcttactttaacagaaaatgtgtctccagatttattctggtgacttaacagactttatttacctccttgttctaaaagggaggtggggattggttcacggtcaaaactttcaaaagacatgaaacgtcaatgtagacttttaatgtgtaatataaagattgcaggttaaaatgtcagaccttccctgtaagagtgtttgttgccgtggctccccctttgtcccttcccctcctgacaatagcatcttgttcaaagataagaaagttacagttttggctgggcttggtggctcacgcctgtaatcccagcactttgggaggctgtggcaggcagattacctgaggtcaggagttcgagaccagcctggccaacatggtgaaacgctgtctctactaaaaaagaaaatacaaaaattagctgggcgtagtggcgcatgactgtagttccagctactcacaaggctgaggcaggagaattgcttggacctgggaggtggaggttgcagtgagcagagatcacgccaatgcactccagcctgggtgacagagcgagactccgtctcacaaaaaaaaaaggaaagaaagttggagttttttagtctctacactgtcggcagaggcaggggatgggagccggtagaaaagagaaaacaattagttggtttgcctctaaaattttgcaaagagatgaatctaagtaaaagtaattctgggtagtaatatggttcttgaataaaaactgaaattttcaaaatagaaaacattgcatcataaacatattaaatccagtaggcttattggtttcatttaaatgccagagatttcattactgtagaggaaatgtcttatagctcttctatttaaactttggtcgggctcttaatttttaaagaggtaggataattaagactcattatgagtgtgactttgtaacttggaagtactatcttcacatttcaaggtatttaaggattgctttagaataaacaaatgcattatgtgaattaattgattgtacctttatacacaaagcatgtaagtacttgtgtaaacttatactctgcttggtgatgttcggaaagcctgatggatgttacacaccagttagtagatgggtagtgttggatgagagcccaaaaatggctctttattgtcattctttaggattacagcacagtttatgtatgtctcacttggccctttccaatacaaataaggcctgtgtatgttctccctatgtattgctaatgaagaaatgaaaacttagagatatcacatgactatggaagacagctactcaagagaactaaggttctgtgtcctcagaatgaaatggaagtgacagatatgatgaatttactttttaaaaattttaaaaactctagaatacaacttatattttgcctataaaatagactgtcttttaaaacttactgccatcttgatttattttatgcaaagttgattttacacaactcaaagccaaaatttacctcttcttttttttttttttttttttttttttaaataaaggagggtgtcattgtgttactcatgctggcctcaacttcctgacctgggttcaagtgattttcccatctcagcctcctgagtagctggaactacaagcatgtgccatcttgcctggctctatcttatgtctatacattcatttcaatggataagaatcaaagtagagatagtgaaatagcctaaatgcagcagtcgaataaacgagttgataaatttttatcaatgattgcatctctttttcttttcttcctctatgcatatagctttggagtttaacccttctgccaatccagaggcaagcacaatattccagaggaactctcaaacagatggtgagacaacattgttttttccgccaagagaaagaataaaagctcttgcttgatcaggttatagaaagtatttagaaaaactcatattggtttaaatttttcaccttttcacatgttcacttgtcttattttaatatgtgatatactttcctttagttgttatgatgttagtgaaaacgtgtaacctttttgtttatacattttgccatctttttatcaacacaattaatttgtcatgtgttggaggagtcatggatttgtctttataattcttggatttatctttatttataattaatggatttatctttatttataatcccttttcccttgctccaaaaagtacactttaaagatgaatgatagaacttaggcttcagcttggttttcatttaaacaaattaaaaaacatagtcgtttatcatcagggattgaatctgtgatttgggcctcctcttacacagtcctctgaccacattcatttaccacatccaagtttacgctactcaaaagttttaggttattaactttttcatttgatataatgtaaatttaaacatgccttactcctgcttatttcccttaatgttatattaaatcctcatttatttgccaacaagccatacacagccaagttttccagttgacttaaacagcaagaacacaagtgagggttctataataatgtgcgaagtaatgcagcacagtaaaacacgggagtttgtaacctttgtttttatagtttgagtagactttgcccatcttgagtcagttatttctggttagaatttgtcttcattttttacattactataaagagatacctaaggctgggtaatttataacaaaaaacaggtttaattggctcaaagattttcaggctgtacaaacatggctttaacatctgcttctggtgagggcctcagcaaacttacaatcatgataaaaggcaaaggggaagcaggtggttccacacggtgaaagagggaggagagaggggaagggggaaggtaccacactctttttttttttttttttttgaaatggagtctcactctgttgcccagactggagtgcaatggcacaatcttggctcactacaacctccatctcccaggttcaagcaattctcctgcctcagcctcccgagtagttgggactataggtgggcaccataacacctggctaatttctgtatttttggtagagacagggtttcaccatgttagccaggctggtctgaaactcctgacctcaagtgatctacccgcttcagcctcccaaagtgctgggattacaggcttcagccaccgcacctggccagtaccacagtcttttaaattaccataatgagaatgtgcttattatcatggggatgggaccaagccattcataaggaatccactgccattacccaaacgcctcccactaggccctgtctccaacattaagggtcacatgttaacatgagacttggaggggcaacatatccaaaacatatcagaattgtatttcccagttccttccagagccatgggcttctcacacctagagagcatggaagcagtaaaagaaaagctattccatgtccctcactcttcggtggtaggaacttttgcctacaaggcccttccagcatcaaaggcagaggcagtgtaggaaacaaagcatggcccaagtccctcttggggcttttattattctggcctctttttagaggaaaaaaaatgattttttgagctgcagacaccatgtccaattaggtttgtatactcattttaacatcaaaatttaggccaggctctgtggcttacacctgtaatcccagctctttgggaggctgaggtgggtggatcacgaggttaggaggtcaagaccatcctggctaacacagtgtaactctgtctctactaaaaatacaaaaaacaattagctaggcatggtggcacgtgcctgtagtcccagctagtcaggaggctaaggctgaagaattggttgaacctgggaggcagaggttgcagtgagctgagatcccgccactgcactcgagcctaggtgacagagtgagactccatctcaaaaaaaaaaaaattaagctacgttactttccagttgtgtaaagaccgttttttaattttgatttgtttttagtgacatattagtagataaccactaagtgtggttcaagatgcttacagggattctgttgcatctagagataggtgtctggtcaggaagtagttcttagagctgttagctcttagagtctgataattaaagtaagctatgtgtaaatgcagaatgagagaatactaatggatcatggctcatatatgcaacagttaaactttttattagctaaatttttcatctggcctaatttttttacccttttcttttgtacatgaggattctttcatttgtatgtaatagaaacaaaaagtaaactaaatgaaaaactaagtttttagatttgacttatgaaattaatcatgccagataatttaaattataaattattgaaaattatttttttaaatggaattttgtctcattttacataggagtaatcagtaagatgttaacaactacttttattttatggtatttgtatcagaagtgaccagtttttttttttttattcttagttgtagaaataagaagaagcaactgtacaaaccatgtaagtaaacactcaaatagttaagaaattgatagtttgacataaaaggatgtctctcttgatttctttaaattacaatgtggacctggtggtggtagcatggacctctttttgtggattttctaaatctcttctattttcctgagtattaaatttatccagaaaagtgtttagcttagcgtgtccaccttttaaagatttctgacatttaagttaaatttcaatagtctggttcaaaagatccgccttaaggctgggcatggtggctaacgtctgtaatcacagcactttaggaggccaaggcaggctgatcatctgaggtcaggagtttgagacaaccctgaccaacatggtgaaattctgtatctactaaaaatacaaaagtagccgggtgtggtggtgcatgcctgtaatctcagctagtcaggaggctgaggcagaagaatcacttgaacccaggaggcggaggttgcagtgagacaagatcgcgccattgcactccagcctgggcgacagagcgaaactctgtctcaaaaaaaaaaaaaaaaaaaaaaagtgccttaaatatttaatcttatttttaatgaaagaacaaaaatagaatagttaagttaattgccagcactgtctattgactttctatcacagcgggtaaaagcgtaccttccccgctacaccatgatcttatgtttctccctgtgtttcttccaattgtagcacactttttaattaaatcagtaatatttacatgattatgactctgcaaatattattcactgctaagtcatatggtgttttcactgtgcctctgcattccatgtccttcatcctgtctctgaaacagttctgaaatctgagcacttctgcaattctcctggatcttcttttttcctagcctacgttagtttatctatccaaatatcgttaagtagcctctgggtgctctgtttgctttcacatccattattttttagcatgaagctaattttctgactatattcatttgcctattttctaacagctgtttttcccccaagtattgtagcatttatcacatgcctttcaaagacattttccatctgcaaaaacacatctgttcctttttatgtgtgtgtggggggcaactttctttggccttttgtcatcctagttcaatatagcgtgggtttccctagatatgctcgatgtctgcttttctgggctaactccttaaagtgttttgggatctcacgtaactgctgtcttgtgtgggatcgcctgagtcctagattctgtgtttccttctgtcctgttatcgtctctagttgtacttgaacacattttcctgggtggagatgttaaaatccctcctctttgatagagagtacacctctaggttgaatctaaattgtatggttctgaagacattttgcagttgtgctcttattacagtgttgttcttgaatctattgccagtgtgtgatatgttatttacaaccaggttttagttatctgcggaagctttttagaatctctctctctaaggttctgaaattttataacagcttgttggggatcttttcattttattgaggctactaaacctgcagactatctcttcttgagaattttttttttattttctctgttacttttttactgatagtcttgttattcagatgctaggctgcttagaccagtacacctgcattgatttttaatttttccccttgtatttttttcagtttgtctttttattctagttctgggatattctgtgactttatcctctactatttctattgaattttgtattttttgagagtgttttaagatttttttttaaagttttgctcctgattttgactggtcctatcaattccttttttctattgttttgatctctttccttggaggcttccctccaatgtgtggtggtccctggcctgctttatttggaagcaggatttctgttaactgatagcactcagtgtgaggccttagaagcctgactagcttttcatttgggagacctcagtgtattatctggggatctttattgaagacatttcagtttcttctgagaaggatctcccaattttctgcctggaaagtaaaagcaggcctggaaaggaaaagcagagttagcaaagacagttggagttccatttttggtgtacagttttctttatatctcaggtttaagccatagtatctctgagccagaaattctcaggtttgatatatccagagaacacacatctaagtttcttgtcagatggaaggacaggtggactttgggctctagttagagatttgcaactgaccttgctggcttttttttttttacattttaccctactttccaaagtgccatttgcctgtaagttcacaacctgcctttagttctgcaagacaaactggctcgcttctgttccagtcactttctgtagtcagcaaagttgtgtttctgtgttatttaccactcctttgtctactttttatgtctcagcatttactaaaaattatctctgtcaaccttctgtgctggtcatgggtgtaacctttattttatgactaatgaggcttccagagggagacgaaataaatttgtggtcaatctattatatttaatccaaatttaggacctatgtttaaatcaaagtctaatttgagtataatgatattaagccagagaattttttaaattaatgtatctataataagcatattacacttttctcctaaggccttgtttaatattttcattcaaagtttatccactgccatatgcttcccattacttcacaacataaatggagctgttttcctgaatgcccaaggtgttagaaatatttaagttaattaagatttgttcatttttagcctggtcaacataacaagacctcatgtctacaaaaaggttaaataacaaattagccaggcctggtggcatgcgcctttcgtattacctactcaggaggctgaggcagaggatcacctgagctcaggagtttgaggctgcagttaactataattgcaccactgcactccagcctgggcaacaaagggagaccctgtctcggaaaaaggaaaaaagttactaattctttaaaaacctatctaaaatttgtcctgcccaaaaggagagtgaaaaatatgaactttagtctttgtttttttttttatgtttgctgagaaaaatgctgtactttatttatttatttattatttccataggtttctgggggaacaggtggcatttggtgacatgactaagttctttagtgatgatttgtgagatttaggtgcacccatcacctgagcagtatccgctgaagccaatttgtagtcttttatccctcaccctcctcccagcctttcccccaagtccccaaagtccattgtatcattcttatggctttgcatcctcatagctcagctcccacgtatgaaagagaacatgatatttggttttccatgctgagttatttcacttagagtaatagtcttacttccacccaggttgctgggaatgccatgaatttattccttattatggctgaggtggtattcctcatatatatatatatatatatatatatatatatatatatatatatgtatgtatgtatatcacagtttctttatccgctcattgactgatgggcatttgggctggttccatatttttgtaattgtaatttgtttgagttcctcatagattctggataatagccctttgtcagatgtatagactgtgaagatttcctcccactctgtggttgtctgtatactctgctgattgttccttttcctgtacagaagctctttagttaagtctcacctatttgtttctgttgcatttgcttttgtgttcttggtcatgaagtctttgcccaagccagtatctagacgggtttttccaatgttatcttctagaacttttatggtttcaggtcatagatttatgtccttgatccatcttgagttgatttttgtgtaaggtgagagttgaggatccagtttcattctcccgcatgtggcttgccaattatcccagcaccatttgttgaatagggtttactttcttcactttatgttttaggtggctttgttgaaaatcagttggctataggtatttgagtttatttctgggttctctattctgttccattggtgtatgtgcctatttttatatcagtactgtgctattttggtgactatggccttatagtatagtttgaaatcaggtaatgtcatgcctccagatttgttgtttttgcttagttttgttttggctgtgccggttcttgtttagtccatataaatttcaggattgttttttctagttctgtgaagaaggatggtggtattttgatgggagttgcattgaatttgtagattgcttttggcagtatggtcattttcacaatattcattctacccattcatgagcatggggtgtctttccatttgtctgtgtccatgacttcattcagcaatgttttgtagttcccaacggcatatcaaaaagataatcgggccaggcacggtggctcacacctgtaatcccagcactttgggaggatgaggcggacggatcatgaggtcaggagttcgagaccagcctggccaacatggtgaaaccccatctctactaaaaatacaaaagttatccgggcgtggtggcgctcacctgtaatcccatctactcgggtggctgaggcaggagaatcgcttgaacctcggaggcagaggttgcagtgagccaagatcaccgcattgcatactccagcctgggcaacagagcgagactccatctcaaaaaataaaaaaaagataatccaccatgatcaaatgggtttcataccagggatgcggggatggattaacatacacaagtcaataaatgtgatacaccacataaacagaattaaaaacaaaaaatcacatgatcatcttaacagatgcagaaaaagcatttgacaaaatgcagcatccttttatgattaaaaccctcagcaaaatcagcatacaagggtcatagctcaatgtaataaaagccatctatgtcaaacccacaaccaacataatactgaaagggggaaaagttgaaagcattccccccgagaactggaacaagacaaggatgcccactctcaccacttgtattcaacatactactggaaggcctagccagagcaatcacacaagagaaaacaataaaaggcatgcagatcagtaaagaggaagtcaaactgttgctgtttgatgatgatatgatcatatacctaggaaaccctaaagactcctccaaaaagctcctagaaccgataaatgaattcagcaaagtttcaggagacaaaattaatgtacacaaatcagtagctctgttataccccagaagtgaccaagcttagaatcaaaccaagaactcaatcccttttctgatagctgcaaaaataaactaaaataaactaaaatacttcggaatagacctaaccaaggaggtgaaagatgtctacaaggaaaacaactttagtatttttaatgggttaaaatgagaggcagcaggtacagcagaagtcagtgcgtgggcatacgcatccaatgggtactgcacctttgatggtaaggctttggttttgacttactaaattactaggtacgattattttctagtttttgtcattaaaccttaaaactactaagtaaccccttccatttcttgttaaatattgtaaaatttcatactctcatttatgctgactgacgttagattgtttgtttctattttgtgactaccttaaataatacctataaagagtaaactgttagtagtgtttttgctgtaattaaatgtagtaagacttaccttccaaatgatgactgaattgtcaaacacttgtcgaagttttggatttactcaaaattctatgctcagcagctggaggtaggaagagtaagggccctcccttactcttatggagaggcatactttctcacgaggggaatactctgcaggaattagcatcttgtaagcagtggtgaattcaactaattagtgtataaaaatacattttttggtgtggctgccgacaaagagatccaagagggtagatggagtcgagcttgctgaagcaaggaaagagaaaagcagtattctaggcagagagcaggggtagagcaggaaaatggctaggtgcaggtcagatgatttatagaatgcaattgatcaagttttgaagtgaatgcaaagtattctccgagagtctcatttgagtcatgtcttggcagtcttatttaaacatgaagtgaaagttagattttttaagttgtcatttgtttttagggtgtgagagaatatttaagtgatactctttttatcctccacataagaaaataggactagagaaacctatggcttcctcacttgttggtggcctagcagccctggcacacagagcccctgaatctgaagcacttcttttgtaacaatatcacctgaaataatacatttaggattagtaatttagtaaatgcattagtcttgtattcactgcaataaaatgctcttgtagcaggattatttaatacactacattttatcgtagtaaataaataatagaagggctgggcgccgtggctcacgcctgtaatcccagtactttgggaggctgaggcaggcagatcgcgaggtgaggagatcgaggccatcctggctaacacggtgaaaccccgtctctactaaaaatacaaaaagttagccgggcatggtggcgggcgcctgtagtcccagctactcaggaggctgagtcaggagaatggcgtgaacccgggaggcggagcttgcagtgagccgagatcgcgccactgcactccagcctgggctacagagcgagactccgtctcaaaaataaataaataaataaataaataaattaattaattaatagaaattcttggctgctttttattgctgtagaaaaaaatatgaaatctcattttaaacttttctttcttttttttttttttttttgagacggagtctcactttgtctcccggcctggagtgcagtggcgcgaactcggctcactgtaagctctgcctcctgggttcaccccattctcctgtttcagcctctcgagtagctgggactacaggggcctgctaccacgcccggctaattttttgtatttttagtagagacggggtttcaccatgttagccaggatggtctcgatctcttgacctcgtgatctgcccgcctccacctcccaaagtgctaggattacaggtgtgagccaccgcgcccggcgaagccgacttttcccattatttttaacggtaattcataaaatccttgttaggtttgatgacaggtaccatattaagggcagcattttataacccatatcttaaacatcatctctggaagttgagagcctccaatgggttttctatagagtgcacatgataccacactcaggcagttcatggagtgtaagacatatcttagtgctttgtcatttgacattttaactgagaaaaaaatacactttgataagtttgacttacacttcccttccccttcaggtatctactgagcgtttcagtcaacaatacagctcgtgttcgacaatattccttgatgacagcacagccagccagcattatcttacaatgacaataatatcgtgagtacaactatgctgccgagggacagattcctttattcggaaattatttcagccatttggttgtcctcttcagcaatcagcttaagaaattggagtcaaccatatattgatatccagattctcaatattaagtatcagtttctcttttaatcttagacgtcgtggtggaaggaaaaatcagttagcaaagaagcaaacccagaaacagtgtatctttttgatgcctttatgcctttagacaatgttgaacacagtgagaaggataggttccctttcttgaatgttttttgtggaaacttagtttttcaatgcatcataggcccaaatcagtgtgcactactttggacattatccttggaagaaggaacagcttttcttcttctggcaccacagtgtatctgcatttgaatttctcccattgtgcatgagcacctcatgggccacaaagatgcgctttgagagcaccctgagatgaagtttattttaaaaggaacaacaaccaacaccaccaccagctccacaggggccgtccagtgtacattattctcatctccttgggttattagtcttgatttttagaacacagtttggaaagtgctaatttagaatattaatgtctttatctttaatttaacttttcattctgtaaacataactagcttataaacaattttgtttcaaatgcactagcctttttagctaattcaattgtcaataacttttacttcaattaaaagtggcaagtttacactcataataatgtcactttcctccctcccttttaacaatagttgagaggaaattgtgtttcaaacaaaaactgaactcaaactctgtctcaagtcctgagctttgggacctattgagtaatcactaaatgtctgtagtcagccaagtctcttaaatctctgagcacacatacacaaaaattactttgactagagtccctggcttcttctgagttccaaagattttgataagttagcatataattcaaaagcagctttgaagattaattttgctgaaactaatttcgtgcttttttcctcattattctactttttagaagtctacttttgagagtatagtaagttttaatttgccaccagcaagtttgagaaatgatcatttggtgtattcactattggtgaaataaagttattgaacaaattaatagggcaaattggcttcaagaagatattttgaaaaatgttttatcatgaatcagtagtgcactgttgtcagtgggataggtggaactcgctgagatcacttatgcaaggtttttttcaaaatgcaagtctgcaaatacatgtatcttcccatctccactttccctctatctctaggcactgagaagccttttaggaaaatcgggatggatgtgaggcatctttctgtgaagaaaagcatcccagaagattctgattttcaccccagctcaatcattccaaactttgctgctgattgaaatcacctgggaaacgtttaccaagaaccttgatgcccaaagccatacccaatactaattaaattaaaatgtctcatgtggaagatgaggcagatattaaagcttctcaggcgattttaatgtgcagcaaagtttgagagccactgcttaatttgagtttaggacgagaaactgctcctatttggtgggaccttgggcaagtcagttttaaggtttgtttccctgatctgtaaaacgagtgttgaattaaatgtcacataaggtcattggtcctttccagcatgtaactttaaattctgtgattttaaaattatttcagagatgaaaactacttgaagcactatagacatatccatctcacatgctaatgttacaggctttttaaaaagtgctgatattgtgtagacctattagtagaattgagatttaccttccctcagttgttttgagcctcactctacaaaattagctgggcgtggtggtacatgcctgtaatcccagccacttgggaggctgaggcaggagaatctcttgaacccgggaggcagaggttgtggtgagccgagatcacaccattgcactccagcctgggcaacaagagcgaaactccacccaccctccccccaaaaaaaaaattatctgggcatagtggcgcaaacttgtagtcccagcttcttgggaggctgaggcgtgagaatcgcttgaacctgggtggtggaggttgtgaggagtcaagatggcaccactgcagtccagtctgagcaagagagacagactctgggtcaaaaaataaataaatacataaaataaatcgcatgggatgaaaggtttcgtcggtagaaaagcatataaaagggacatctgttattatttatatattgtaatcaccaacagaaacgcgtcttctaacggcatatttccttgcattttggttctcatatttttgtaaaaaacaaagaaatgaaaacaaagtgcccttatggtactgttctgaactagaagatttgaatttcagggccgctaggagagtttcctctgccccccttttaaaaaatgtcttcaggcctaacaaatgataacatctattgttatgaattttttttccttccacagtgtgaccttggagatacctcatcatatcacacaaaggtgagctttttagaaacctgtcttgttattctagctaattactttgcaagatatcaagcacagtgttaggtcacagctctagacatcataagctgtattgtgcctactaaaatatcgaagcaaattatttgtattttctttgttccttaagactctcataattcttaaatgattgagaatctcaaagagtatatgtttatattgattatattgatatttagtgtggtagaattatacaattgaaattttttcaaaatctatttttagtttagatttcacagccttaccactgttgatattatgggctagataatgctttgttgtgaggactgtcttgtgcattgcagagagtttagcagtattcatggcctctaccaactagatatcagtagtaacccatgacccaggttataaaaacagaaaatattccttgagaacagtattgttaacagaagtttttcattgaaaaaaaacttttctacaacaaaaagttgagtaaaaagtgtgtcatttgtttatattatttaaagtctcgcatgttgagcttaataggagacaaatggattctctagagctttctttgcaatttgcttcaaagaagcaatatgaggctgggcacagtggctcacgcctgtaatcccagcactttgggaggctgaggtgggcggatcacaaggtcaggagatcgagaccatcctggctaacacggcgaaaccccgtctctactaaaaatacaaaaacttagctgggcatggtggcacgcacctgtagtcccacctattctggaggctgaggcaggagaactgcttgaacttgggaggcggaggttgcagagagctgagatggtgccattgcactgcagcctgggtgacagagcaagactctgtctaaacaaacaaacaaaaaaagcaataagctggtggggcgcagtggttcacacctgtaatcccagcattttgggaggccgaggtgggtggatcacttgaggtcaggagtttgagaccggcccgaccaacatggtaaaacccgcctctactgaaagtacaaaaagtggctgggcatggtagtgcatgcctgtagtcccagttacttgggaggctgaggcaggagaatcgcttgagcctgggaggtggaggttgcagtgagccgagttctcgccattgcaccccagcctgtgtgacagagagagactccgtctcaaaaaaagagaaaaagaagcaataagatgacctaacctcatgcaaatatgtagttggtagaagatgtatttttaaagttttcagacagttgtgggtatttgttaaaacactaaatcaaaacttcacaagtggtggtttcttaaattagttacggtggcattttacatattaataaatttattccatcagtactcattgatctttcttgcacagtaaatggatcttttgctccatacttgcatttataatatcatgcattagttacttggaatatattggtttatgttttattgtgtcaaaaatcacttttagtttaaccaccaatcttactttaacacgcctttaagtattgaaaagctgccaagcctacagtagaaggaacaagtttttcaaagtccagaggaaagcttaaattttatcattgggaacaaatacgtatttcccttgaagtgacaacctctcacttcatttatttttgagaatgatagttgaactggttttttagaccgagtttcactctgtcacttggctggagtgcattggcatgatctcagctcaagcaatcctctcacctcaggctcctgtgtagctgggaccacagatgtgtggcaccacgtcaggctaattttcttatatgtttgatagagacacggtttcgttatgttgcctaggctggtcccgaactcctgaaggagctcaggccatctgcctgctttggcctctcaaagtgctgggattttacaggcgtgagccactgcgctggcccagttgtacttttaaataaaaatgatgttctgtgaaaaaagtgatttttcagttcacagttaaatcacggattctttaaaaacaaacaaaaaagcacttctcattaactttccacttattcagaatattagagacatgtcaagatttaacaacattaatttttattgcttcatcaaagacgttcttaagaaattcaggctatgttttttacctgtaggggacagtgaagaatagaatgactactaatgtaattggtaccactgccttgatttatgctgagaaaccagccattgtacctacttttgcttttatacaatcatggcaagtgtcaacgaaaaagcaggcaatgactttcacaaatttttaaaatttttcatcagctttctcaggtttaattagtatgattcagaacagtgttggccaggcacagtggctcaggcctgtaatcccagcactttgggaggccgaggcaagtggatcgcctgaggttaggagttcaagaccagcctggccaacatggtgaaaccacatctctactaaaaatacaaaacttagccaggagtggtgacaggtgcctgtaatccctgctacttgggaggctggggtaggagaatcacttgaacctgggaggcgaaggttgccatgagccgagatcacaccattgcactccagcctgggcaacaagagtaaaacttggtctcaaaaaaaaaaaaaaaaaaaaaaaaaaaagaacagttatgacctcttaggccttctggaaggggtcttcgggatcccgagaggtccacacagcacatttggagaaccactggtttatacacaggcacaatgcattagttttacaaagtttaaagttcatcaaagactggcctcttaaaaaggcaggtgagtttgtcattcagacaacagaaaatacataaaaacatcatgagagtatactacagagaactaaagagaaaggaagctaggaaatctgaatcacatttacatttattaaagtttactactactgctttgtagaacattcttgtgtttcaatgtgtggttagaagagtgaaaatatgtttggtttattgccatggcctgttagggagagtcaatactcatgggcatttctgactggttatcatataaaaggcttcacggtacaggccatgatgtactgagaaagaagaagtcaggaaaccctctgcaagtcaggatccaggagaagaattcgtaaaaactgctttggtaaagtaaacaccaaagcacacaggaggaagtattttactcaacaaatattatactaagatattaacagtttttgaagtaacgcgctttcttattttatagagatgcagatagatctttgagcatacctgatgaacagttaactcatttgcggtaagtggcacttttattgaggttgtattttcattgtacacttgtatctgtttcatgctgaagtcaaagccatctttttttaaatcttccccatttcatgttgcatttagtcatcttaagtgttgtaaaaagaatgtgctggagtaagaactgatctgcagctctgtttagttagtgagctagtatgagtaaatatactatccaaacaacagaaaatgtatctttttttttttttttttttttttttttgatggactctctttctgtagcccaggctggagtgcaatcgcgcgatcttggctcactgcaggctctgcctcccaggtccctgttcaagcaattctcctgcctcagcctcccgagtaactggaattacaggcatgtgccaccatgcccagctaatttttttttcttttttcttttttttgtaaagacagggtttcaccaccaggatggtcttgaactcctgacctcgtgatccacccaccttggcctcccaaagtgctgtgattacaggtgtgagccaccatgcctggcccagaaaatgtatctttttaaaaggtaattgtgagctgtctataggaccctgcaagccactacccaatttttgaagccattcctccttctgttccacacaggtttccaccgtgcacattacgaagaacagaaatggaggtgggagtttaaataactattcctcctccattccatcgactcccagcaccagccaggaggaccctcagttcagtgttcctcccactgccaacacacccacccccgtttgcaagtggtccatgtgctggtccaacctgtttacatctgagaaagggagtcacccagacaaagagaggaaagccccggagaatcatgctgacaccatcgggagcagcagagccatccccattaaacagggcatgctcttaaagcgaagtgggaaatggctgaagacatggaaaaagaaatacgtcaccctgtgttccaatggcgtgctcacctattattcaagcttaggtgattatatgaagaatattcataaaaaagagattgaccttcggacatctaccatcaaagtcccaggaaagtggccatccctagccacatcggcctgtgcacccatctccagctctaaaagcaatggcctatccaaggacatggacaccgggctgggtgactccatatgcttcagccccagtatctccagcaccaccagccccaagctcaacctgcccccttctcctcatgccaataaaaagaaacacctaaagaagaaaagcaccaacaactttatgattgtgtctgccactggccaaacgtggcactttgaagccacgacatatgaggagcgggatgcctgggtccaagccatccagagccagatcgtggccagcctgcagtcatgcgagagcagtaaaagcaagtcccagctgaccagccagagcgaggccatggccctgcagtcgatccaaaacatgcgtgggaatgcccactgtgtggactgtgagacccagaatcctaagtgggccagtttgaacttgggagtcctcatgtgtattgaatgctcaggaatccactgcagtcttggcacccgcctttcccgtgtgcgatctctggagctggatgactggccagttgagctcaggaaggttatgtcatctattggcaatgacctagccaacagcatctgggaagggagcagccaggggcagacaaaaccctcagtaaagtccacgagggaagagaaggaacggtggatccgttccaaatatgagaagaagctctttctggccccactaccctgcactgagctgtccctgggccagcacctgctgcgggccaccgctgatgaggacctgcagacagccatcctgctgctggcacatggctcccgtgaggaggtgaacgagacctgtggggagggagacggctgcacggcgctccatctggcctgccgcaaggggaatgtggtcctggcgcagctcctgatctggtacagggtggacgtcatggcccgagatgcccacgggaacacagcgctgacctacgcccggcaggcctccagccaggagtgcatcaacgtgcttctgcagtacggctgccccgatgagtgcgtgtagtatctgttttatttgactgcagtctccttggtgcaaaaacaaaatgggaaaaataaggataactcagaatttcaaaaggaaatcacaaattcagctagtaatagcattttcagtacttttcgtaaactaagtgaatacacaaaatgttgatttttctgaccataagacatattttatgtccttttgccaaggtggatgtgttagtctcaggccctcctggccacattgcccaagtcacacaggcttctgtattatgtatttagataaaatgtgtgaaaatatatttgaaaaaaagttcataaatatgcattgatttttgtacacatggcacctctttttcatttttatttttattttttttttggaggatgttttgctctgttgccccagctggagtgcagtggcatgatatctgctcactgcaagctctgcctcccggattcacaccattctcctgcctcagcctctcaggtagctgggactacaggtgcctgccaccacacctggctaattttttgtatttttagtagagacgtggtttcaccatgttagccaggatggtctcgaactcctgacctcgtgatccacctgcctcggcctcccaaagtgttgggattacgggcgtgagccaccgtacccggcccatggcacctctcttaatttataaattgaactggatgtgaagtaataatgtcagctagttgagataagaaggttacagttcggctgggcgcagtggctcacacctgtaatcctagcactttgggaggcctaggcggactgatcaccaggtcaggagattgagaccatcctggctaacatcatgaaaccccatctctactaaaaaaaaacaaaaaattagctgggcatggccgggcgtggtggctcacacctgtaatcccagcactttgggaggccgaggcaggcggatcatgaggtcaggagatcaagaccatcctggctaacatggtgaaaccccatctctgctaaaaatacaaaaaaaaaaaaaaaaattagccaggtgtggtggcgggcacctgtagtcccagctacttgggaggctgaggcaggagaatggcgtgaacccaggaggcggagcttgcaatgagctgagattgcaccactgcactccagcctgggcgaccaagcgagactccatctcaaaaaaaaaaattagctgggcgtggtggcgggcacctgtagtcccagctacttgggaggctgaggcaggagaatggcatgaactcaggaggcaaagcttgcagtgagcagagattgtgccactgcactctggcctgggcaacagagcgagactcggtctcaaaaaaaagaaaaagagggttacagatcattgcacatggaaaatattcccagcagtaaccacttccattaatgtgatctacagcttttaaaaaggagcatctcagaataagatggtggtacaatttgcttattgagaaaggaaaaaaaaaaaaacacgagtatattacaaagggaaaagaaggaatgtgatttctcatgattgaaagcttgatttagattgcatacagcttttgctacccaagaccaagaggctctggcaagacagggtggttttccgaatgccagaccgaggtgccttatgaaggcagctgccgatggttccagatgtagagagataggtgatgcaggagggaaagctggattggaaaagggagagttttgtagatgggctacgctcattgtgcctttgaaagagcagagccggcagcctctagtcatcatttggatatacaggactagagcatgaatctgatgtagagctacagaatgaagagcaacagcagctgtttaaacaccaagaaagtgtgtagaatgaaattggacaagccaagcatggtgttttcatgcctttagtcctagctactttggaggctgaggtgggggaattacttgagctcagcagtttgagtccagcctgggccagatggtgagaccctgtatcttaagaaaagaaaaaataagaccaggtgcagtatctcatgcctgtaatcccagcactttgggaggccaagttgagaggactgctcgagtgtaggacttcaagaccagactgggcaataaagtgagacccatttttaccaaaaaaaaatcaagaaattagctggacatggtggcacatgcctgtggcctcagctacatggcatggcaggctgaggcaggaagatcacttgagcccaggaggtggaggctgcagtgacccatattcatgccactgcactccagcctgggcaacagagtgagaccctctctcaaaaacagataaagtggacagaaaataggtcagtaaggactaatcatttaagggacaagcccccagaagagtggctactagagtgggaggaggaaaagcagaaggagaaagagttgaagataggcgaggctgtggtcccagtgctgaattctgccaagcagtgacttgattcatgaacactcactggatgctgactctgtttctcttctgagtgctggggtagaggagaggagaggtggagcacagttcttgcttttatgagcttatgttctaggaagttcaagtattttttcaggtagtatgaaatagcaggaagaggaagcaggctaaagggacacagagtgattgggggctattttaagtagaatgataaggaagagcctgtctagagagctatttgaacagtgacctgactgaagggacaacagaaagcagtgctgacattacaggtagcaggatgactgccaagacagaaacgcatttcatatgtgttcgaggaacaaacagcaaggtgaccagcatggggagagtgaagaatgagggaaaccttgaatgagaataaagcaattccatgttggatgctaatctgccatattctgattaatcccagttccaacaattcatctacgatttctattttatctttttaaaaaatatattttttattttttgagactgagtctcactctgtctcccaggttggacttcagtggcacaatctcagctcactgcaaacttcacctcctgggctcaagcgattctcctgcctcagcttcccgagtaactgggattacaggcgcctgccaccacgcctggctaatttttgtatttttagtagagacgaggttttaccgtgttggccaggctggtctggaactcctgacctcaggtgatccgcccacctcggcctcccaaagagctgggattgcaggcgtgagccaccgtgtctggccatacacatccctgctgaagcccgcattacccttcccctatgctatagaagccctgggtcgggggggtgggggtgatggcacagggatccaccatcttatcttggtgccatccctgacttgccttctgttcataaacgcctattaaatgtttctttctgagaaactggatttgtcagcctctttctttggtatctcaggttccttggcctttgcgggtaggtttatatagacctgctcagcacaggacaggcagtttctcaaaaaattgaaaatagaattaccaaatgatccggcaatatcacttctgggtatatagccaaaataattgaaagcaaggtctcatagaaatatgtgtacactgatatttatagcagtggtattcacactcgtcaaaagatggatgcagccgaattgtccataggcagatgaattgataaaatgtggtatatacatacaataaaatgttcttcagccttaaaaaggaaggaaattctaacacatgctacaacatggatgaacatcgaggacattatgctaagtgaaataagccagttagaaaaagacaaatacggtgttccttcacttatgtgaagcgtccagactgagtaagcaaactaatagaaacagaaagtagaacggggtttgccagggacatggggaagggagaaaatgggaagttgcttagtggatatagagttttggttttgtcagatgaaaaagttctggagattggttgcatggcaatgtgaatataccctacattacccaacccaagggctctccttgacccctgttccaactgccacttagaagtggttaaggtagtaaattttatgtatattttaccacaattcaaaatagaattattatttttttattataattttttgagatccctcactctattgcccaggctggagtgcaatggcgccgtctcggctcactgcaacctctgccttctgggttcaagtgattctcctgcctcagcctcccaagtagctggaacttacaggcacatgccaccatgcccaactaatttttgtatgtttagtagagacggggtttcaccatgttcgccaggctggtcttgaactcctgacttcaggtgatccgcctgccttggccacccaaagtgctggaattacaggtgtgagccaccatgcccggctgtcaaaataggtgttttgttgtttttttttttttgagatggaggtttgcttttattggccaggctggagtgcaatggcaggatctcggctcacagcaacctccacctcccgtgttcaagcaattctactgcctcagcctcctgagtagctgggattacaggcatgcaccaccatgcccagctaattttgtattttattttagtatagatggggtttctccatgttggtcaggctggtctccaactcctgacctcaggtgatccacccaccttggcctcccaaagtgctgggattacaggtgtgagccattgcgcctggccttttttttttttgtgatggacttttgctcttgttatccaggctggagtgcaatggcacgatctcagctcactgcagcctctcctcccgggttcaagcaattctctttcctcagcctcctgagtagctgggattacaggcatgcaccaccatgcctggctaattttgtatttttagtaggtatggggtttctccatgttgatcaagctggttttgaactcctgacctcaggtgatccacccacctcggcttcccaaagtgctaggattacaggcgtgagccacggcgcctggcctgaaaaaaaattttaaagtttgagaaaatacaaaattttcatagtctccaagtatttctcctaagatctttccccctatgagggggaaagatagtaactttacaatggagaaacccagcagaaacctgaaccaaatgaacaagttcaacatcatcagtaagaagaactatcaatgccataactctgatggaatgcactgggaaggattccacatcatttttgtgctgtaattgccaaaagttcgtaacttcagtccaatcatggaaatacatcagacaatcccaaatcgaggaacatttcacaaatactgatcagtactggttcaagatgtcacggttatgaaagataaggaaagattgaggaactgttattgcagtcctacaaaacggcgagagactaagaaataactaaatgcagcgtgatcctgggtggaatttgggaacagaaaaaggacattagtggaaaaagtggtgaaactccaataaggtcttttgtttagcgaatatgttcattttaaatcagttaaattatttaaatatatttaaacattagttaaatgtatgtaattaaattaataaaattggttattttgtgaaataattttaatatagttaaatatgagaatgtggatttcctggttctgatcaccgtactgtggctatctaagaggtgcatgttcagggaggctgggggaggaataaatggacattatactattaagttggaagagagaaacctaccccatcagtcacaaaaccctcacattcatggcagtgtgtcggacgttgcagtatgaatggcatttcccagatgtcagcgcgaggtccctgtggagggagtggggctccctgggaatctagtggagagcattcggggctcccttcctcaggagcctgcccttcctgcacagaagcgtcagcctcacctctgtaccactgcccctctgcctctcagaacccactcggcttcaggaagattctactgccagcctcctttcccagatacagcctccagggactcagccctgccttcccaagtgttcccgcctctcttgggaaggggtgctctcagatcccacacccctggacttccctgggcaccacctgctccttcttcacttctccagctctgcgttctcactctgagggtcctctcctgctgggagtgtgtgttgctggcaacagtgaagattcccccctgggttgccccccatgccctgttcttctgcacttccctggcttcctgcgttggttctgctggtgtctcctgcttttgggtttacgtggcttcccagcttcctaatttctctgaagttgagtttgatgtgtgtattgatgatgggctttttcctcctcctcctcctcctcctcctcctcctcttcctcctcagtcttgttgttgccccatatactttccagaaggagaaaagggacactgtaaaattaagctgctgcaggctgggcagtggctcatgcctgtaatcccagccctttgggaggccgaggcaggtggatcacctgaggtcaggagttcaagaccagcctgttcaacatggtgaaacctcatctgtaccaaaaatacaaaaattagcaagccatggtggcatgtgccggtaatcccagctactcgggaggctgaggcaggaggatctcttgaacgcgggaggcagaagttgcagtgagccgagatcatgctactgcacttcagcctgggtaacaagagcaaaactccatctcaaaataataataataataataataataataataataataataataataatgccgtgtttctatcagacccagaaatcccgcagagtgagctggaattctctgtttatctgtttccccttcatacccactggctcctctctgcccgctccttcttggactgcatcagcagggtgcctcactgtctggccctagtggaattcacacagtggaggacgtcataggaggtgggagagagagagagagaggagaggtggttattcactcagattcttccttgctggtttggcagtggccacatctttctactgatggctgcagctcctgatgatcctcctctatagccacagctctctttgggatctgtggacacctttcctgtccctctagacccagggagataacagctcccactcttgctggtccaggacattcctcatctcttactggttcccttaactcggtccacacttctgtgaacagcccctttcctcaagcacccattcgaatatgtcctctggcttccaccaggagcctgactgatacccacaggtgggtgaatgctggcgtgctgctgggcccctcttcctctggtgactggccagccaagtctccaggagtctcgttagggtgggcaggcggtgggcacagcataaactgtgagctcaaatccacagaacaaaagtgggagaagacactggcaggatggaccgccacaaaactcttggcattcgtgacgtctgtcctttaaatcacgcaaggcatcatcatgcttcagacatgagacagcctaagtatttaagtgtttcaaataaacaaattgtttttcagaattggtaattgctaagttggcaaattgctattggaaacattggctgtcctcgactcaatgattcagccagctagtcccttgccaaactagtttgttgggcaaattccaccttgagaatttatctgctcctgtcaaagccagattctccctgcctgaggggaggctggacttgaccttctgactcaggatatgctgacttgggtccctaggtccaagggcggccctcttgggcccactgtgggctggacctcttccatgatggggtggtggagggcaggccccacctgattcacacttgacctcatccaggcaggtgaagttccctgcaggagtcacctgagcccagcccctcagaccaggatccatcatgtttaggaggatttggggctatctcatgttctttggctagaaaggggtcccactcttaggggtctgccctctgtggggcacagatggcttgctggggcccatggacggggctgggtgaacgggaatctggtcacagcagcagcagctggaaggccaagagggagggcaccagggcctgggacccatgtcttgtcctgagcctccccgggcctcttgccttctccccagcaggcatttgggatctgtgtctggacccagcctcacccagaaggccatggtgtgttgtcattagaatcacagtgctcacaccaaggcagtgcattaaattagcagggcagggtctcatgggcaggggaccatgtggagggggtggggggaagggcagttgtccccagaggccgtggtgggcctggctctgggctgggcagtgggccagggtcctgctgtgtggatgagctctgacaacaggctgtctgggtctggtgagctcctgaaagcgcggactggtggagagtaccctagggtgggagctcatgaggagggggtctgtggggtctggaagccattctagagcaggcagatgacatttatcaggggagcaggcatagaaaggacccttgtgcgagtgggggggacacagcctcagaagaaacagggaaggggctttgacaggtccagggagaatccctgaggtttcctagaacaattcccaccagccatgtcccaggtgtcgccccatcccccaggcctctgcagtgccagcccaatgccctgggcaaagcatcctggactctggctgttacaaaaggaggacagggtcatctggacccgcctgagctccaggcccccgactttcacagccccttctgggtccagaagttcatacgtatataaatgaaaaatgtgcaagaatcatattattgtattctttttcataaagaggcccctctaaattgttgaagccccgattcacccctgcccaaaggagacagcaatggcatgtgtggggccacagtcttgagacccagaggtcctgctgcccacgatacccactgtccaccctaggggtactggccgtagccctggagcccgcaaacaccatgcaggaatgcaagagggtctcagctccagagtcccaggctgggagggcccacagtccagtaaactaatcaggccctgacacatccaggagagcagctccaggagcctgcattggggagacagcctcggacccctgccacaggcctgcaccccagaagtaggagcatgggaagacctctccttggctcctggccagcagaagtcacattccccagccctctggctccaaggcagcctcacgtcccagtcactccttggcacaccctaccggttggtcagagctcactgccaaagggcacctcaatgatgagtggagggaacaggtgtttaccaggagcttgcatgctttgtctcagggatgattagggacacagccaagaaggcacgctatgcccattttacagatgaggaaacggaggctcaggttgggctggtgactaagggaagcagcatgtggcaggtggcttgaggcatgtctgtccatcatgagtaactagggagcagccctgccactcctcatgcgatgcaccaggagccagggaagctgctttctaggggattctagctaaggccagaagcatctccctgagtggtggtggaggcctctgtctactcctccaggactgccaggggataggagggcaccgctgacctcacagagcctcttgggtgagtgagcatcagctgagtgacaccaggtgactacgcttctgcccagtgctgtgcccccctctgactcaggcaaggcaccaccctgaacggcccaccctgtcccatggaggccgcaaactgctctgcagagccagggtctccaggaatggggagggcagtcaccctcattccacttgtgttcatgacccaaaggactgcccaggtctccaggcccatagaacccccaaacctcttactaggccacactggggaccttgagcagcaggcttggaatcctaggccttgtctccaggtacatatcagtacccaggcttgggaagctttggtctcaggggggctggcactcaggccctctgcctcaaggaagaagcatgtccagatctctactgtccagccctgctccctgcccctatccttcacggggtccctaggacagggttacagaagcctcatgctgtcaggggatgctgccaccctagttccagggtggctccgcccagccccttcctgctgccgccctcactgactcacctgtccagcctcctactgggctggggtgagggcttattgccccagagcctagacaggcaccagaggcagctataaaagcatgttgggccagtcctcagcatcctagtttgccactgtctgctgccacacgatgctgggaggcctggggaagctggctgccgagggcctggcccaccgcaccgagaaggccacctagggagccagtgaggacccggggctcctttctacctgggctggggggatctggggcagactgagtctgtgggaggcggatctacgtaggcaggcgaggacctgcggagaggccttggcccctcaggaaccctggtctcctgctctaccaagtcagcacggagttgaggggtgcagacctggggaggtctcctgggggcagggcatgagtcctggtgctgggtgaacactggcagcttggacccttccctctggaaatctggggagcctttcttgtcaaaacagcctattctgaataacctatgcaggaaaaggaagatggatttttatttttaccataactttaaagcttcaaagatttcttaacaagtcaccaagtctgttcaaagtcaaaaagggcattttcaatttcatccaagtcccctaaagcatgtttatttttatttgtatttgtatttgaaatggagtcttgctctggcacccaggctggagtgtagtggtgcgatctcggctcactgtaacctttgcctcctgggttcaaagtgattctcatgcctcagcctcctgagtagctgggattacaggcacccaccaccacgcccgactaatttttgtatttttagcagagacggggtttcgccattttggccaggctggtcttaaactcctgacctcaagtgatccattcctcttggcctcccaaagtgctgggattacaggcgtgaaccactgcacctggtcccgaagtgtatgttgtattcagaggtcagcaggtatgtgtggggaggcccagccaggccccactcatgggtcatcgtgtgaaaaagtcttgcctgagtttgtgtcctctttctaaatggcagcagatgcgtattttgtttttgactctgcagctggtgtggaccacctgctttaacctttcactagcctctgagttttttatgattcctgctgggagaaaagctgagcgttgggagaaaagctgaggcagggcttgctagacttgctggctccttgcttctagcactgccattctctcaagtagccatatgtttctcattcacttgatacactgttgcctttcaacctccacatcctcaccacctgtttctttgttagatcaccaataaatagcgtgggctcccagaactcggggccttcgcagcctccacactcgcgatagcgctctgctcccattttctctctcgaactgtctctttctcattcctttgactccgctggacttgccgcccccgtgacctggtgttgggtctcatcatcccaacagattcccattctaaagatgagggaaccaagaggtggaaggtagagttagaataagaaccatttcttctgactctgaaatccttcagttctagcacactaccacccacactttaaaaaactctgaagtaggcagagaattccgttttgttggaggaattgctttgagagacctggtcttactggatgaggctttggaaaccaacctgaggcaggcgctagcacatcctgagaggggtgtgacctggcacacaggcccagcctgggcttcatgtctcagctggcaagactgcctgctcattgccattccaggccgggcagggccaaggggcttcagggacccatgccctcatggggctcattgagctcgtctcccagcagccaaggccctggcatctccaaatgaagccagctgtgggggaaggtccttctcatgagccagtctgtcctggctgggggtggcatcccagagccccatctaggatgcccagggatgtataggtctgttgtgaggataagccagcactgagccctcaccctggactgggagggcagtgggcctgctctgagccctcaccctggactgggagggcagtgggcctgctctgagccctcaccctggactgggagggcagcggctctgctctgaaccctcaccctggactcgggggcagccggcctgctctgagccctcaccctggacttgtctcctctgttcagttcatgccgtggaggaagtggtgaaggaggtggtgggacatgccaaggagactggagagaaaggtacagccggctgaggtcgggcagggaaggagggagggaggaagggaagctaggtgctgggccaacctgttctttgactaaccaggtcaaactctgcccctaatgttgcagcctttcagagcctcttagctggggcagttatctatgctcatcagaggccacagactgtactgcgttaggacactgtctagatggttctctctgtggaataagaagacaaagtcacacaagactatgtgacagcacactgggacaaaacatttaacatggcagggcgcggtggctcatgcctgtaatcccagcactttgggaggctgaggagggtggatcacgaggtcaggagattgagaccatcctggctaacacggtgaaaccccgtctctactaaaaatacataaaaattagccgggcatggtggtgggtgcctatagtcccagctacttgggaggctgaggcaggagaatggtgtgtacctgggaggcagagcttgcagtgagcctagatcatgccactgcactccagcctgggctacagagcgagactcggtctcaaaaaaaaagaaaaaaaaaattgctgggggcggtggctcacgcttgtaatcccagcactttgggaggctgaggtgggcggatcatgaggtcaggagatccagaccacggtgaaaccccatctctactaaaaatacaaaaaattagctgggcacggtggcgggcacctgtagtcctagctactcgggaggctgaggcaggagaatggcgtgaacctggaaggtggagcttgcagtgagccgagatcgcgacactgcactccagcctgggcgacagtgtgatactctgtctcaaaaaaaaaaaaaaaaaaaaaaaaaaaaaatttaacatgtaaaattctatgttaaatgttaaattgatgtgtgtgagctatgagtagtactatgtacaaagcatgtgtatatctccttccttttcaacaaaatagattccaggtagatgaaggacttacatttacataaatgaatttattaacttactaggagataaccatcttagcgcaggctgctattataaaataccataggccaggtgcagtggctcacgcctgtaatcctagcccttcgggaagccaaggcgggtgggccacctgaggtcaggagttcgagaccagcctgaccaatatggtaaaaccccattgctactaaaaatacaaagaccagctgggcatggtggcacatgcctgtaatcccagctactcaggagtctgaggcaggagactcccttgaacctgggaggtggaggttgcagtgagctgagattgcaccactgcactccagcctgggtgacagagcaagactctgtctcaaaaacaaaaacaaaccataaactgggtgacttagaaacaacagaaatttatttctcacactcctggaggatgggaagtccaagatcaaggaaggcactggcacatttggcatctggtgagggagtctttctggttcatggatgggcccagctctgtcctcacatggtggaaggagctagctctccgtggtctcttttatgtgggtgctaatttcaacctcccaaagtccccaccccttaatatcattacattaagactgaggatttcagcatatgagttttgaggggtaagacatcataaacatttagacatagtaataacttcagagactttggcctaatcttggagaggggagaatctttagaactatgacaaaaaaatcagcgccataaaggaaatattaagtaaatttgacaatccaaaactgaaattttctatagccaaaaaaaaaaaaacactataaaccaagccaaaagaaaaattatacactgatgaaaaatatttgtcataaaaatgataatccaatataacaacccaatataaaaatggtcaaaagacataagcaggcattttccagaaaaaaggataagcaggcaatgtacccatgagtagatgctcagtctcactcacagttgaagaaatgcaagttgttggggaaattaaaaccaaattcaaattcattctgcagtaatcctgctgcccttggtcccatcgggccactccagagactaatccattaagatggccacatcccacaggccactcaaggggacacaagttcagcaggtggatcactaggacattcttcctctttccaacagccattgctgaagccataaagaaagcccaggagtcaggggacaaaaagatgaaggaaatcaccgagacagtgaccaacacagtcacaaatgccatcacccatgcagcaaaaagtctggacaaacttggacagtgagtgcacctgctaccacggcccttccccagtctcaataaaaagccatgacatgtgtacattgagcgctggatttattcccatttggatggaaacactaggcaaagtattttcttgttgacataacatattttacatatttatggagtacatttaagtatttattacatgcacagaatagtgatcaatcagggtgtttggggtgtctatcaccttgaatatttggtattactatatgttgggtacatttcaagtcccttcttctagctactttgtttttttgtttttgtttttgtttttgttttgagacagagtcttgctctgtcgcccaggctggagggcaatggtgtgatctcggctcactgcaacctctgcctcccaggttcaagcaattctcctgcctcagcctcccaagtagcttggactacaagcgcaggccaccatgtccggctaatttttattattattattttttattgtttttatttttagtagagatggggtttcaccatgttagccaggctggtctcaaactcctgacctcaggtgatctgcctgcctgggcctcccaaaatgctgggattataggcatgggatactgtacctagccttctagctactttgaaatatacaatacattgctgctaactatagtcaccctaggtgaagtatttttcaacagaaacactttgcatgtcccccgtgtctcctctgctgaggtggacactggcactggggcccctgctgctggttggataggtcctcatgatgaaacagatgcttctctgtcatgctaagtaagatctttcatgtcaggaaggggctcttctggaagaatagttagtgtctgtgctacatttcctaaaaaactgtttccccagaaactatatacagctttcaggtgcctcagtgcttcaagacatgctaagggaggaccctcatttgtcttgcatgtttttgggatttttcttgagatgttcttgcaggactcagggcagataacagaccagcttgatgaagaatttagcaaggaaggcccccactgagctgcttcctgttctcgcagagatcagataagcatttctgctggacagttacagaatctggtcaaggagagactgagtcactgctcatcatcctagaagctgctgttgattttttttttttaaagacggagtttcactctgttgcccaggcaggagtgcagtggcatgttcttggctcactgtaacctctgcctcctgggttcaaacaattctcctgcctcaacctccccagtagctgggactacaggtgcccgccaccactcctggctaattttttgtatttttagtagagatggggtttcaccatgttagccaagatggtctcgatctcctgacctcatgatccacctgccttggcctcccaaagtgctgggattacaggcgtgagccaccgcacctggcccagaatatttatttagagagtgatgtcaggcctaagtgttgatagtgggtagtagtgggcaagatgcctggccctctctctttcttctcatgagagaaggtggaatgccttccaccaaagaaacgagacctccccatgaccagctgctccactaaccacacatcctccagtgatgcctctgaatggtcccgaggggctgtggtggccgggcagagccaggcaggagccagagtcagcctggggggtgatggagctgaggccatcaccggtctgacagtggaccagtatggcatgctgtataaggtggctgtgccgcctgccaccttctcaccaactggcctcccatctgtggtgaatatgagccccttgcccccggaaaaaaaataatattgcatatgcagttgattaaatggcatactccatggctattaggaatgatgaaaatgggctgggtgcggtggctcacacctgtaatcccagcactttggtaggccaaggtgggcagatcacctgaggtcgggagtttgacaccagcctaatcaacatggagctgtgtttactgagtggggctttcgcaggctggagctaagaatttccagtatgcgtaacagccacagcccaaatatctgccagtgagttgtgtaattccccagagcaggcctgggcagtgtctgggtggggcctgggagccacaggagacgcccaaagccaggcagagcccgggggcgagggggcggcaggcaggtgtagcgctgccctgggcgggcttgcacccccacacccaagtgagcggcctgctcactcctcagctgcaggagccagacgtgtggagtcccagcagaggccaacctgtgtctcttcatctccgtgagaaaggtgcccccgaagtgaaagagatggcctggtggaaagcctgggtaagtgggagctggcaggagatttgggttcctgcatggtgttgggtgctggtcaccagggagtcctgagaaatgtaaagtcgcccttggctgggagtggctcagtctacatttggctgcctcctgggccaagcatggagggtgggaaggggccgagaagaaacagtcccaggcctagagtgcccacggcagggatgggacctgggccgggagacaggctgatgaagaaatctagaaatgcaagggggaagctgaggtttgagaagagtccaggggagggacccttgcaggggtggggccactcaaaggagggggtatcatggttgagccttgtgtgtaaatgtgtatggggtgcacacacgtgtgcatttggggagaatcaggcatactgctcctggcagagggaactgtgtgcagagggtcagagggcggggagcttggctttgagggaagctgctcagcacagctcaagggtcctggtaccggaggagatggacctggggaagcaggcagggccaggtcctgaaaggccttgcctggcaggctgaggagttaggctttaccttaagagaagtgggaaggcactgaagggctttgagcatgagagtaacctgaacctgctgttggggacccatcaatgccttcacctcagggatcaatgatgttcatttgtcaagactggagagggaagaggggaagcaggaggacctagcctgctagagcctggaggaacccggggctcagggcagcccatgcccagcagaactgatgggttctcgggagctttctgtctatggttgagcctgaggccatcgctgtgctaaggagttgaatatccagaaggggacagaggtgacatctcccggctgccggctctgcacacccttttcctttcctcccaggcagcctcaggatgtcagggctgcactttctgttttgcagatgatgaaatgaaggctcagagacactgagtgacttgctagggtccaatggccagcaggctccagtcagagagcagttgggtctctctgcccagccccaggttctctgtgagcttttgtgggatacccaggcttgtacagcttcagggagtctctggatcatagatgtcgcaacccaagcaagtgtcctcagggtcagacatgctaggttctggacaggtgggacaaagaggaagccaggctgaggtggggcagctgtcctggcccccagggaagcagccttcttccaggacaaggggccatggaggcctgcagcttcaaccagactgctgggaacctgcctttgaggaggtggacatggcagggagagcccagtgctgggtggtttccaaagtcagttgctggccaaggcagtctggcactgggccttgcacccagtgcagcaggacaaagggctgtccatgtagggacctgccaaattgacaggatcactgtgacactcactgagtccctactatgtggccggacccttctctaagcacctcacattcaatatctcccttgaacctcacaaggagtctatgaagtagacaccagtatccttatccacagatgaggaaactgaggcacaagtaggctaggcaggtgcccgaactcactagtaagtgtgagagtctaggtgagaatctgaacagcctgactccagggccaaaaccataccctggtcgtccataccccatgtgagagctggctcggggtagcaagttcacaggtagaccccacctgcaacagctgagctgctagcgaagacccagtgtcctctaggcacaaagctgggccaggaacgggatgggaggagatgagggagccactggagagagatctgtctgcaggcagggcccatctgcacctctctttttggtgttgccttttcctctgtgtctctcatagagacaaacccatctcccaggcctctgggcagccacatagcaggggaaggccaaggcgtggcagctcccctgtgcctgtcacagaacaagttatattaatagatgtagtcacaggctggtctgagtcaccttttcagtgaaaatgtgcctgtctggactagcacggccctgggcaagaccctgcaggagcctgaggctgacccttccttctcagcaggaggtctggagctctaggactccacactgatagccagggctccgattcccagaacacttattttctaaaaccttagagtgggaagtgagacagaggcttctcaatgcagcaaaatcagaaccagcccgggagctgcttacaaatgctgcacctgagatctaccgcacccctgcgggactgcatgctcctcagggatgcggttacacagcctggccactcactggtgcaccacagcccccgagtgctggggcagagggaagccggcaggcactgagagctgagatgcctcccacattcccagacgacctgcgttcctgtgggtgaagcttccttcagtggaacgttccaggaacactcattgcctgggaaaggtggagtcatcagtagggcaggggaggtagatagagctcagcttctgagtcaggctggggagtcccaacagcatcgcttaatagctgtgtaagggagtccagctccctttctgtaaagtgaggcatcagtacttacctagcacaactgttgaggaagccatgacataagcattgcttctaaagcacctggcccaggtctggcacacacaaggggcttgaagtgctaacaggagtaatagcagagcgtgactccacaagcaagggatatcgtgtgtgtggacaccgatgagcaatatctgggaccacactggctctctctggatggaatttccataggaattatttctaacaatttctgctgtgaaacatggtgctaagaaatgactcaggaagatctgtcaccagacatttgaaattaaagcaaagagttcagaaagatgccttacctcttactcaaaggaaagatacttacagatataccatccatgggaatctctgtattttcacaatctaacccagggcttcgatggatggatggatggatggatggatggatggatgggcgggtgcatagatggatgggtgggtggatggatggatggatgtggtagtcaaatgggtaagtgcgtaggtgggaaagtagatgggcagatgatggaggtgatggaaggaataagtgaacaggtaaatggaagacaagactggatgggactaaactctttttcatcctggaggatctctgagtctccctctaattcaatacctatctccaatatccctccattctctaccattcctccacccaaaacacacttatgtccatgttaatcatctgagaaattctgcagggcacaagtttaaagagccctcaggcaagccctgaactggaggcttggaaatcaagggttcaggcccttggttatctggtttatttcacaatctgcagagcatcgtgcgggtttttctaaacctgacgctctgagccccatgggcctgtggacttgcaaacaccctgaactatcaatatgctcagctgggcccctgccctctaagttgctgtaagtcccaactccccaggaagagggcagactgagctcaaaccattcctcagaaaggcagaaccatgctcagccttccaacctcatctgcacactctgaaggtggtgcatgcagctccaggaagcctttgcttcagtgttctttcccctcctaactttgggtgagtttgtcccttcctgctgctggtgggtgatgctggaaggagctgggtgtggctggggctgctgtctgcagtcagatggcacagacagggacaggaaaggttttgtggcttctccccacaagctctggctctggctactccaccctgttggccaaggggctgaagggtggagcactggcctgcaagggctgagcagatctccgtgcccagggaaggggctcaccctgtcagggcgggctaccagatgggctgggagcctgctctgccctccctgtccctgcctgctttgagcaggcctggttctcttgcagattgaacaggagggtgtcacagtgaagagcagctcccacttcaacccagaccctgatgcagagaccctctacaaagccatgaaggggatcggtgagtgggtgttggcagccttgccacctctgctcaagacccctccgctcacagccctggaaagcgggtgccaggggacatctggggagctggggtgtcccatgatactctgaaactgattccactacccagagaatcacacagccctctgtttctgcagtgaggtcagcacccaccctgcaagactggacaggagggtgctgctcttccctgggtaatgggggtggggaggtgagctgtgtgtctctgtgagtgacttcccatcagtctcagctttctcacttgtaaagtggccccaagaattcttggcctcgtgtgtcacatgaagtgtgaagggggtggtgctttatgatgccaggcacagagctgctggggctgtgaggtgttgggagtttgtggggctgattcaaggcccccttgccccatgtcgatggccatggagccggctcccttcccatctcctgcacttgcccagtgctgccctcagcactaccgtgagtgggcgagggctggcctgaggccagatttaaacagcttgcccagaaagccctcctgacctgagagcagagcatgtaccctgacctcaccccaggtgggactgaccccttagccggctctgcctgaggatcaggggccttaatgagaactgccgctcctgacaagcccagaaaacgttctcatgccctctgctttctgtgaagcagaaagttatctccacttcccaaatgagaaaacggaggcccagggaaatgaggctggctgcccaatgccatgcagttgctgggccaggcctcggattcaggggttggactcttagtcttgaccttcccctactgcgaccaacacaaaggagggcagggccagagatctcactcggccaagctccaaaggcccgggctgatgtccagagccacccagacctcagattccatcttgtgaggctggccttgggcacgccccaacattgtgggggtgtgggtgggaaatggggaggcagatttcctaagggtcttgtttacaccacgaaaatggtctgggggtttggaactatccaggtgtcgggtcccaactgctcagccaccaagcagctgccttcgccttcccctcctccgccctcaccagtgtgtcaccctgggggcagcagggtcacttgtgctgtaaccctgcagggaccaacgagcaggctatcatcgatgtgctcaccaagagaagcaacacgcagcggcagcagatcgccaagtccttcaaggctcagttcggcaaggcaaggggaaggctggtgggggtggggataggtgagccttggggttgggggtacagcctgggaggcagctccattctggacgactttcccctagagccagcccactggcagcatgggcacatggaacctgtttgcatgaaaacaattgttctttattgaaattcaaatgtaactggctgccctgtgttttatctggcagatctacttttaggtgtcagagcccgggccgggggctggccttccttgcttcctttcctgcctcctctctcacagcattccttctcatgcacccaacaggccccactggaggtctgtctccctgcccccaggctatctcgccctgccctctgagcccagaccaccttctcttttccatgccccaggcatgcaggcctggctttgctctgttctggggcgtgggcatgctttcctcagttgagctgcttgcacccacacctcgtcccttctgcctcctgggaattctaagagcctggagtaagcatgccaggccctttgtttctcctcccacctgcactccacccctaggacaaagcctgacatttgggggtacacagtaaacacaggattaaatatgtgcacagccatggttgcctcaagcctctagtgactcatatcattagtttggagatgtaacgaaggaagatcagctcaaatattctcttggagaacccggtatgcatttttacagtttccctctcttagtcctcacagtgatacattctttgtattcaaacatttggggaaactggcactcagagaggttttaagttgcccaaggtcccagagcctgtaatcaacaaggtggggattaaaatccaggtctgacaaagcccttgatctctctgctgctctgtagatcagctgatgtagcctggtggctcctcgtagcaacatgtgaccttagaaggaggcacatgtgagacgaagtctttaattcaggcatgcattcattcattgagtgccaagtgacaggtattttatggtgatgccatactcagagcttgcagtctagctagcaataccaacttcattttactgagagcttatgatgtgcccagcactgcactgaatgctgaattgagtcacacacaaccccctaagcaacgggatgaagcaggagcacgtttctctccgtgtaaccggtaaagatactgatgctaagagaagctaaggagctggcccaagaaacccagccagcacgtggcaaggcccacgcagaatccagcccaagcccctggacccagccaccactccgctgcctgcactcaggtgggcctggcttatgacaaatatcacctttccctgttcccgcattaggacctcactgagaccttgaagtctgagctcagtggcaagtttgagaggctcattgtggcccttatgtacccgccatacagatacgaagccaaggagctgcatgacgccatgaaggtaaccaggcagacagggcaggggagtggcaggggtgctcacatgactgggtaggggcaatgcggggaccgggaacctacagcccagagctccccttgagccactgtttggaatggccatatgggccatagctgggcccagtgagcaggcagcctgctgctcagactgcacccaacacctggagtcactggtgcctgattgacacgttgagtggccgtgatgaagccaaaatcagtacttctcagaacctcacgagctcaggtgtacagtggtattggaaacccacctctacagtcccaggcacagccccttgggtttccctttacctctcactactctttgcttttgcagattaataaggatggggacccagtaactatagtcattttgtttggaaagacacttgctgcatgggcactgccaggcattttacacccacgctccctaatctacctttggcgcaggggaggcttcttattcctgtttatggatcgggatgcttaggctccaggacatggagcagcctgtctgagaccacccagctaaggagggagagctgagacagggcttccccgtcacagcacttgccctcaatgttcatcactgaagacaagcatgtgattttctcatcacatcctcccacttcaagtggggcagggcagtgaggtccttcctgaggctcaggcatcttgagaaaagaaggtgtggacagagcagaaggtcatggcagagcactccagcaggcagaggtttctgtccacagggcttaggaaccaaggagggtgtcatcattgagatcctggcctctcggaccaagaaccagctgcgggagataatgaaggcgtatgaggaaggtaaggggtggcacagatggaggggctcaggagtggccacaagctttggcagcctggcagggaacaaggatcaagaattaacctgggccacactagaaaggaccctttggggacttttttacccacaggtgctgagcacctaccgtatgccaagatctgtgcctgatggtgacactgaacatgactcagacttgatctgtaagctcaccagctcctcttacaggggagagaggcctgtgaccaactaaaatctctgcccttgaggactgtggtagtagggggtgtggaccccaggctagcagaggccagtcagtcctccacatcatgtacctagtggggagttttcctggaggctttggctttgccaagccttgagatgaaatggagcttggttggcagcccctagcctggctctctgacctggtccatcttgtgctttgagcttggttgggtacgcatgtcgcttctagttgtgaagcaccacccaggcgacagccacttggacacccgggcattgcatccatgccctgtgccaaggactttctttcctagaaggctttaataaggagaagtatggggaacagggctggaaggaggaaagcaggccccgggtaggctgtgggcctctgcttgtgcctcatggtcctgtttccctgcagactatgggtccagcctggaggaggacatccaagcagacacaagtggctacctggagaggatcctggtgtgcctcctgcaggtgtcacagcctaggctcttgggagtgccttggtttgggagtcccaacagctccaccccagggagcagcccttgaatagcgccacaagagtcagggtaggggcatgggatagcccagcagccagggctcattgggtgtgtctcagcatggttagagggtcccaactgcagagcccccacacctgtccttactcagccatgtgagagcatcctggaagcgggaggagagcaggtccttcgtgcagacctcatgccaggcactttgcttaccttagctcactgaatccgccaagccttatgaggcagtccttaccacccccattgtacaaatgaggaaaccaagggctgaagagaataactggcttgtcgaagtttccacagccaaagagcagcagagccatgcctaccctccaagcccaggatcccccctgtgcccttaatgctctggtcagctggcctgtcttacagagccacctcctctgttcctagggcagcagggatgatgtgagcagctttgtggacccggcactggccctccaagacgcacaggtgaggctgcgcccagccggccatgtggccccaccccctgccatctggactctggctcctctgcccacgggggctttctctgacactgggctgggacccacccagctcagctccctataggcctttgtcctgtggtgtctggggaggagagtgagggtgttgggagactcgggaggaaggagtgtgacttgggggtgggggagcactaaagctctgtcctggcaggaacagcccatgaacccgggggcgctaggccccagtgctggacacaggtgtccgggtctctgtaggtctgcctgctggcagagggaagtctggggaccaggcagttcctagagcagcttgtggcccaggatagagaaaatattctaagccagagctgctagagaaaggggagctccctatcagagatgaccaagcaggggagcatgctggcctggcagagtggacagggccaggccatggccacagctctgggactctggggctcagtccctcacctccctggtctccctcactggcttattgtgggtgtcccaatgctaggatctgtatgcggcaggcgagaatattcgtgggactgatgagatgaaattcatcaccatcctgtgcacgcgcagtgccactcacctgctgagaggtaccagggagggaggggctggggccggggccacagggggtgtcctggccatgagcctctccctcgtgcttctgccttgtcaagtctagagttagggagagagccagggagcccaggactgtttccccagccaccagtgggaggtcagggcggcaaattgatgtgcgatctctgatccgagacactgaggggcatcacgaggaggtctgaccatcccctgagcagagccctctccacagtgtttgaagagtatgagaaaattgccaacaagagcattgaggacagcatcaagagtgagacccatggctcactggaggaggccatgctcactgtgggtaagagctcagacttgcacgtttttcaggccacagggctcaccgtggggcagcaccaaagaacaaagggcctagggatgcgaccacaagagaaagaatccctgtgtcaccttcacgggatgtccccccgactcacactctgcctgtctccctcacccagggactgctccacctctagagtcccagtgtgtgctgccaaagattgttctctgtgctgcccacgtggtgcccagtgctgtgtggatgtgtctgcatgagtgtgtgtgtgcgtgagagtgtgtgtgcctgagggtgtgtgtgcatgactgtgggtggaatgtgagtgtgtgtgtgtgagacagacagtgtgtgtgtgtgcgcacacaaatgcatacgccagtgattatgccagccccaaccctgtgtgtactcatggcagccatgcagggagcactctggctgtggttgtgaagccctggccagcacaaagtcatctttctggacatgaaccaggggcctggcccctgccttcattgccagttgaagaaacagtgatgtgtggcttgagtccaaactgagtgacggatggtctgatgctgagaaacactggggatcttccccacagcaggaagtcagggccactcaggaggacccactccagagctctcatgggttccagggctgagatcacaatgggaagagtcactgcagagtaaagagctgaggcccagggcagagggacgtctcttctcccacttacacacagagcccaggtccggactcctggcctgcagctctcacctccacaccaggctgcctccgtgcaaagccagcagccagcaggctccctgctgtttcctagcctctctgggtggacagggccatctgagacactccagctggccttggatgctgtgatacaatccggtctatgtcaggacatctaatcacacccctgctccaatctcagcttccacccctggatctggcctgaacccaccaagaatgaagtctgccagcagggaatagtgaagccatgcagtgctccgtcatgctgggccttcctattcacttcaccttgaagcctcgcatcagtctcacttcccagatgagtcagggaggttgagtaatgaagccatactgcaccatcaaggcaggaagtgaacacatgcctacctcactcaaagcccatgctccttctgcagccctaagtgaaaatgccaaccttccccacccagatgccaagtctctgagcagtacccatgggagcaaacatgggcccagtctctggaccagacgcccccaggtgccttagtcctgtggggccaaactccacttgtcacatgggaattcaaaatgcagggttcctgctgataagtgtgagagagagggcactctgaggccagcagccaccatcccatggtgcttctgtggagctgagaggctggatttttggtggaggtgtctctgggttgagagcccagggcctgtcctgagtctgagctgcccttggatgggcttgagctggtgtcttcagacgagccccacagtctggtgcatttcacatcttacccttttgcctgcctgcttgggcctttggagctgtgcccagtgccccgggctaccttccctgtcccacaccacctgacacaaagcctctcacattgggaaaggcacggaacaaagaaatatgccaagccttgcacaacactgactcttaagacctaaggcaagacataaagttgtaggcagtgccacctaccagctccagacattaacacagctttcttgtttgccagtgaaatgcacccaaaacctccacagctactttgcagagagactctactatgccatgaaggtaactgtcctgtcttcttcctgacgctcaccctacatagcaccaagtgcaaagccaaggagctcaaagccaccacgatcctccacacgggggagttatcttacccaaacctgtcgtggatcagaaaggttttagttctcggaggtgaaattgagtctgggaaagggacgctgcatctccagaggtgaataattccctgaaactaaaaccattgcccgttttctctgattgatggttgctgatatcccctgaagttagttccacacctgaaacccaagccctctggccacttctgcccaggaaatgagagagggcatgcgattcccttggccatgtggccccagctgacatgagactggtcagggatgaaggtgagcaggaaggccctgcctgtgaaattcctggctgagctgattgctgccattgctctagtaggaagtcttgttcctggagcagtgagtattttgtgtctagaatctgatgtggcaaaccaaacatactgcagtttggagcacttggcatcataaaggaagagttctgggcagtgggtgagaaggaattaagggagtggacaccctaagccaccaaagcttccctcctaatgcttccctggctgaagcacaggctccttcccacatctccctccctctaaaagccccagaacccaaccacacagatccgtccatcactcagagatggacaggaaaggtgaggcaggattgttgatggctgctgtcttgcccagggagcagggacgcgtgatgggaccctgataagaaacatcgtttcaaggagcgagattgacttaaatcttatcaaatgtcacttcaagaagatgtacggcaagaccctcagcagcatgatcatggtaagcaggcattcccaatgctgaggccagcctgaaacccagacattcagggaaacctggaggctgtggccaacactacgtgagcccctcccttcccagtgggcaccatgtgcttgcattcatgaccatgtggtgtgtgcagggaacagcagaggtcagtgtggctggatcccaaggggaatggggggcagaggggagatgcagagaccagggcacagaggctcccctgtgtcccactcagaaagttggtttcacatttaagttatggttgctccttggaaaagacaccaaatccttgcagaagaagccacctctgaatagtcaatgagatgaactagtccggtaggaatcgggcccaccgctcaaatccagatttaagtagtcctggcggccaacttctaaggagataagtcagatgagcgccaatagactatctaaccagattccaattagcaaaagttctggagccttcaaaacacagactgattatcacgctgcgataattgggagaaacagctcttctgggggtgtctgcaaattgaggtcttgatgatttcattagcagaagtcacattaggacaaatgtatccccaagttttctttggctactaagtcaagtctctagctcttctgcaaatgtcgttgttaagtgcacttttcaagaaacacatagctgacaataggtggaaaagacatttctgtttccagatgtttcaagatggcaacatcttgaaacaggtgggcaggggcaagagaggattggaattattcttggtttcacttgaggctccccagccaatcttgtcgggagacaggagggcaaggcacacaccagcctggactgtgctgtcacctgcagacagtctgagctgattgtcattaacccttttaaccacacatggtaacttacggcatcagagagatttctacagatacatgaagccaccctcttcaaattttatctaatgttgttacttaagaaaattgagttagaatcatgaatacattgaccaaacgtttctttttagtgtagaccacagatgtcattaaagcaaaaatggttttcaacactaatatgagttaaaaactcctgcattgaaattaagaggcaaatgtataaacactccaagtataactcatgtatttgaaaaagtaaacaaaattaatgcttttctttctaaaaactattcgaaaaattgtcctcaaaataataaaaatcaccaggcgtagtggcccacacccgtaatcccagtgctttgggaggccaacgcgggaggatcgcttgagcccaggagtccaaggctgccgtgagctaggactgcatcactgcactccagcctgggtgacagagtgagatcgtgtctagaaaggaaaaagttaaaaaaaatttcattgtagtttgaaacccgtaatgagatttcaggctcaaaacaggcaaattttactaaatggtgaaaagtagacaataaccatgagacctaaactggtccagagtgtggaaagtgggtctagccccagtctaccccttactcaccatgccgttgtgaatgaattcactcccctctcttggccccgctgtcctcaactgcatgaagaagaatctgggtgatctgacctggcccatttcccagctctgtatgcagaccccggactagccagtcccatcaggacctaccactatctaagaaacagggctcctcagtcatcggaccacaaggtcagtctcatcaggagacaaacactgtggacccgatgtgagccagatgcagggcagaccagctcgccttcctcctgctgtaccctcaccacgtctcagcaagatgcacagcagcacagcattgatctcatttcatagatgagtcccacagaggtgaaggggcttgcctcggccacaccgtcagggtgcgatggtccaggctccctccacccccggccctgcccccaggtgtgtgctgatgcctcactctcagccttgattcccaagctgccacagcaggtgttgaataatgatgcatcctgttgtgtaaatgaatggctgggcaccctggctcccgaatagaagaaccctgggacagctgaccccttccttgtttaggagtggaactgtctctgattcattttccacatcaatcctgcatgtagttggtaagagaatcaaaaggaaatgtaaaggaatagcctgaaattaaaaacaaggaaagaggggtgatggcacaacccctgcggctaggaaccctggagggccgggccaggtgcaggccaggggcacacctcttagtcataataacacagccgccactgccgagccaggcacaagcaaaccccttctcacgcttatgcgcctcctgcccacaggaagacaccagcggtgactacaagaacgccctgctgagcctggtgggcagcgacccctgaggcacagaagaacaagagcaaagaccatgaagccagagtctccaggactcctcactcaacctcggccatggacgcaggttgggtgtgaggggggtcccagcctttcggtcttctatttccctatttccagtgctttccagccgggtttctgacccagagggtggaaccggcctggactcctcttcccaacttcctccaggtcatttcccagtgtgagcacaatgccaaccttagtgtttctccagccagacagatgcctcagcatgaagggcttggggacttgtggatcattccttcctccctgcaggagcttcccaagctggtcacagagtctcctgggcacaggttatacagaccccagccccattcccatctactgaaacagggtctccacaagaggggccagggaatatgggtttttaacaagcgtcttacaaaacacttctctatcatgcagccggagagctggctgggagcccttttgttttagaacacacatccttcagcagctgagaaacgaacacgaatccatcccaaccgagatgccattaacattcatctaaaaatgttaggctctaaatggacgaaaaattctctcgccatcttaataacaaaataaactacaaattcctgacccaaggacactgtgttataagaggcgtgggctcccctggtggctgaccaggtcagctgccctggccttgcacccctctgcatgcagcacagaagggtgtgaccatgccctcagcaccactcttgtccccactgaacggcaactgagactgggtacctggagattctgaagtgcctttgctgtggttttcaaaataataaagatttgtattcaactcaaagtatctttggatgtttagcagggaccagtgtaggaccaatttaatttgtcagaaacagagctttggggagccacgaagcctgagcgcctcgtgggcatctcccagtgggaacactggatgggctgtacctgagcacctcatgggcatctcccagtgggaacactggatgggctgcagccaccgctgccctggggacaactcttgcaaatgagggtagattctattcacctcctgatgtgtaggctacatccttgtatctcagggttagagagggatttaaagtcagctggtgctgttccaacctgtggcctgactacccccttggcatccacccaggggtggtccttggtgtgcttggggtgcacttgggtactcagggtgtactggcgatactcagggtgcagttgagtactccgggtgcacttggctgcctccaaagatgggactcactgcgtcctttgacagcccaatctttttccaatggatgtgaccagcaaagttcttgctttacctgaaccaaaatcagccgcatcaagcccacacctctgccatctagggccacaacacttattccctcccagtaacaacattttggatatctgaagaaggcccacaaattctgcgatgacctctgtcaaagcccagtgtccccagtcccttcagtggtccctcctggagcctgtttggggccatcacccctgaacatgctccagtttgcaaacttcccctcaagtggccctgaggggtaagcgtgtgcccaggaaccagcctgatcagggagatgggaatagcgtgggctctgaattcacttggacgggaggcagattctggctctgccctgcaccagctccatgactttgactgtgttaggctattcttgtgttgccataaagcaatacctgagtctgggtaatttatttaaaaagggggtttaattggctcacagtcctgcaggctatataggaagcatggtgccggcatctgctcagcttctggggaggcctctggagggaccttacagtcatggcagaaggtgaagggggagccaacatcacgtagcgagagtgggagcaagagaggtggggggaggtgccacacacttttaaacagccagatcctgttagagctcaagatggtgaggacagcatcaggcgatgagggatccgccccctgacctaaacacctcccaccaggccccacctccaacactggggatcacatttcaacatgaaatttggaggggatatccaaactatatcagtgactgagtcacttactctctgagcctcagtttcctcacatttctatacagggtgggctcccagttacaactgctgcctttcgaaccaccccagagccagtagcataaaatcctcatgtataatgttcacagattctgtgggtcagcagttctggagggcacagcaaggtgcttgtctctgacccaacaagtaaggggactcagtctcagttgggaagacctgaaggttgggtgactctagggcagaggggtgcaaccatctggatgcctcttcactcacatgttgggcccctggtgagatggctggaaggccaggctcaactgggactgtcccctgcactcctacacgtagcttctccagcatggtggcctcagggtagcaagtggtagggctccaccgtctcccagtggacaagaaggacaccacattgccttctgtgagttagcgtcaggagtcacatggcatcacttccccggtgccctatcagttgaagacaccacaagccaccccagcttcaaggaaaggggacacagacccaatctgtcaatgagaagagtgtcaacgaatctggggactgtttttaaatccaccacaagtggtgctcagaatatttaacaactggtgcagcacaacccactcacctgaatggctgctgtctgcaggggtggagcagagctcgagtagcggcccctgcagggccaggcctcaacccttagtgctggatggcagggtgtctgtggggccccaggggaggctcctgggtgttgggggtgcagcagctattcaccaacatgtcttagtcttttcagactgacatacaaaataccataaataggtggcttaaataacagacacttattttgcacagttctggaggctgggaagtctaagatcaattcagttcctggggagggcctcttcctggcttgcggacggctgcctttttgacacgtcctcccatgacctttcctctgtgcttacacgtgttcacggggggaagagctctctctctctctcctgctcttttcataagatcactataccatcatgagggccccgccctcataacctcatctaaccctaattagcttccaaaggctcatctccaaacaccagcaaactgggggtaagggcttcaacaatacacaatcagactgtaacacagcaaggcaggggcccttcgggagtttaacaaccttttagtagttgtatcagtgtgcgtctcttggatcccagccctgggtgagaattcttattcctttctttcagttcaagtcctgctctgtgtgcagacttgctttcagttctgagccattgcctagctgctttctgccaaaactctttagaaaggatttagaggggccaggcgtggtggctcagtctgtaatcccagcactttgggagaacgaggtgggcagatcacgaggtcaggagatcgaggccatcctggctaacacggtgaaaccctgtctctactaaaaaatacaaaaaaattagctgggcatggtggcgggcccctgcagtcccagcttactcaggaggctgagccaggagaatggcgtgaacccgggaggcagagattgcagtgagcagagatagtgccactgcactccagcctgggtgatagagcgagactctgtcaaaaaaaaaaaagaaaaagaaaaaagaaagaaaggaaggaaggaaggacttagaggatctctctgccctgcaagctcccctgaccactggttcgatgggttcttttgcagcccaccccaaaacaggcctcatgtggccaaacaggagccttgagaagagctgcagccaaggaaatttggtcaagtccaagtacatgcccagcaaggggatctgcttaagcagagtcatgaagttgatcatctcccctgatggggcagaatggacatcacccccactgcctccctgccagcagagaaatgtgggacaggcctggaagcaagaggtctcctcagattagaggggaagctctctctgcctggggtcagagctggagcagcatgggtgtaaggggtcacggccccatgtgctgactccctccaggtgacccccatggcacctggggaaggaagcaaaggggccctggccaggacaccagcagcatccacagcacctgctaatcatttttgctggagtaaccttttgggcacttctggtaaagcagacacgctccacaggtgcttttgcaattgctctttggaatttgttaaaaatacacctatgtttttaaagataatttggagtctgcctagtttaatttcagcataggggaaaaataagggaatagtgacaaagtttctttacttgagcaaacttgagtcaggctcctgaaccttctaggctcatctgtgtactttcttgtaaaatccaatttgagcaagaatcccactaagtcaattcagcaagaactccccttgttcctatctgaccactcccaatatccgatcagggtcctcatcctccaccttcccaggtgatgtctggtcaccctggcctttcttcagcaggtctcctgttaggtcagtttagccagcatcaccctcacccctggcatttcctcttggtaattttccatctttcaactcctacctgctccatggctccaagtctcaacttctcatgctgtttttagaatcagcctgactgtatattgaggtctcttttcgcttattgcaatagtcctgaataaaatctggttttactactttatcgtctagctctggtttttctttgccataggtattccctacctgtagccttgccatagctctatcatcgttgctttttaattccctccaagagatgatatctacatatactccctctctatcctcagatcaatgttttgcatttcctaggagctgaattccttttcttccattgcagcactggctgggagagaaggcacaacatggtccagcatactgagccccaagtttgtcctgcagcatgatttgagacacagtgttcgtgccacacagaattctgtgagccgtccaatagcctttcatacatttgttttctgcttaaactacagagtagatgctcttgtcagcacctaagaacactctctattacacagaactacaccctaatgacattttatctgtttacgtgtcctctcagaaaagctgtgagccccttgaaggcaggaactttatttgtttttaaacattcagggcctagtagatagcaggctttcaacaaatatttttgaataacaacaaacaagagtatggactttgggaacaggagagcctagtagccagcaagcctgagccaatccttgatggcctccaattctgagaagactctctgggcccccttaggctccctgtggaagaaagcttccccagtcaatcctaataaaaatacttctgagacagatctaacaggacaaagtggagtctctccactctttcagtagctccttcaccccaggtgctgtttggggttctgacactgccatggcatggccagcaggatggcccctagggctcctggggctgctctataagagcttcccacccctgacctgcagtccatgagggcaaggccagatccgggcacacgcccatccgtgttgttctcatgctctcagggggtagagctagtgtgttggacttggcatgtttagggtcacctccctgagggttgacaacctgagcaaaatcagcattcccttggcaaggaataaagggggaatggatttgtggtcagcaacccacatcgttggtcagcaacccaccgccaagcattctgcctgcaacagggtggggctggccaggggaggctcctcagggaaggtgaaagctgtgcagagttttgcaggatgactcagtgcttatcaggtagacagataaggaagaacattccagggagagggaggaatgctaacaacagcaggggatctggtctgtactagacatgccaaaggaatggtgtgtccatatcaacagaggagggagagacagaagagaaagagcttgtcagggcctgagtcagagcgggctcatgctgtggggctaagaagctcaaacgatttccagagacagtggggaagctttacagggacaggcaggggaggatcttaacccggctttcgtaagcctctggcttgagtatggaaggtgagtctgggacagggagcccagcgccgaagtgttgcaacgctatagggagacatacagaccaattccctcccacctaacagctctgtgctttggggtcctgggttagtttcctgggagaaggctggccttggctacctctgtccttgaccaaggacatcgttttaaatatttgtgatgtgtcctaggccactgcatctctgtccctgtagtgaagagaagatactgattcctaagctcctactctgagaacacaaatatctgcaatacttcggtaagccctaggcctgagtgtgaggttgcaggcacttccatggccccatgcaggtgtccaagttccctcgtggtatttggccaaggggggccctgtgtgatgccctagcgcggtgactacccgtgttcctggcccatgggcatcttccacggaattctgggcttagcctggggattcatgcgggcgcatctctgtgatctgctctggagcaggatgtacatcaggtctctcagacctgagtccctggtgcctggcgctcagccttgactgaagtgctcggcccaccctgctgggccagccagctcctgctcagggccacagccctgtaaccacggcttcctccccaggactcaggaattctcccactccggaatgccttgctgctggggtgaccaggtcttcacttgtgaaacaggagtcggccacctcagccctgcgcctggcctggtggaacatgggtcaccgccccaacctggggcagccgccccatcccaacgcagttgctgccgctctccatgcctccctgtgcccagctaactgggggacttgtcccctgggaaaacctgggtacccaggctgcctttggtttcagcccctactcctcttcccgggctgcctttgctccccggacggcccctttccccgggctgtgttcacatcggctgggaagggtcccttgcagacagatcttggacgaggtcgcgtcccccctcgtgaccagcaaactcctaaaagccgcccttgccccagagcccctgtagcctccaaccggcagtcaggaggcagcgccgtctcagcgccgcttagtggcgccaggcgtgcctggaaatccgctttcgcagcgccccctcgtagccgcctccgcccgcagaaaggcgttccctggacagagaagcgggcgcgcgggggcgggcgcgcggggccttgccggagaacctgactctccgcagcagcagtggaagccagagtgacgcgttgtgttgaacaccagttttctggagcgctgtgtgttctcatagctgagcagtctgtttctccaatcaggtttcaaagccacttcaactgcactggcccctgtgggtcactgctgcaccgccctggcccatgtgggtccctgaggagcgacctgccggggccacctggctggacgaaaaagacacaccttggacttaagccgtgagaaaaaaaaaacttcatcagtaagaaacaagtcaatagacaagtaaaagactaggagaaaatatgcataaaacataaaaaagtgacttgattcctgattctggagtatttaagaattcctataactcaacaaaaagttcagttttttaaaatgagcaaaaggcttgggtaaactattcacaaaggaacatagacaaatgccagtacacacatgagaagcgcatacacatccacaaacttcaaacaagcccacctcatgtatttctagtgagtaaggaaaagaacgcaaacacttttgaaaattgtttggttgtttcttgtaaatttaaacaaataccctattatattatccagcgagtccatccttaggtttttatccaaggataaagaggtgaaaactcatatctaacaaatagacttctgaaaagatgaaaatagaagctttattcataaaagacaaaaactagaaataacccaaatattcattcacaggagaatgaataaacagactaggttgaatccatacaatggaatggtagcagacaataaaaagaaaatgaactattgatgccccctactgcacagcagaagctctgaatcgtgttcctgaatgaaagaagtcaggtatgaaagaataaacattgtatgattccatttatatgaaaatgaatctgtgatttaaaaatcagactagtattaggttggtgcaaaagtaattgcggtttttgccttttttttttttttttttaaatagttgctttggggtttatggatggagtggcatggtagaggttagctgaagggggcatgaaataactttttgggggtgctagagtgttgtaaatcttacagtgggggagggacaggagtgcaggcatttgacaaaacacattgaattgtgaaatttaagatttttgaatttctttgtatgtaaattacctgccaataaaaacatgacgaatagagcagttatgagcatttgtgtgtagctttttgtgcaaacttaaattataatttctctgataaaagcccaggaatgtgattgttgagtaatatggtaagtgcatgttttttgagaaactgtcaatctatttttgggagtggctgtgtgtatcatgttatattcccacaagcaagggatgagaaatttggtttctctgcatccttgctagcatttggttttatcattatatttttatttcaactgctcaaataagtgtgcagtgatttctcatgatctcaatttgcatttccccaaaggctaatgatgttaaatatatttccacatgctgatttgactcggccatgaaatgtctcttcatgtctattgcccaatttcttattagattttttttttactgttgagttttgagagctctttatgcattgtaaatgtgagtcctttgtcagatacgcgtttgcaaatattttctcccctccatagcttgtcctttcatcatcttaacagaatattttgcagaggcaaagtttttaattttgatgaagtccaatttatcaattctttctttaatgaatcgtacttgggtgccatgcctatgaactcatcctcaactcctaggtccagatgattttctcctgtgtcttcctatcatagccagaaactagaaaagaaccaaaatgtccctcactaagtgaatgcttaaactaagtgacacatctatgccaatattcagcaataaaaagaaacaaattattcatgcaaataactaaatggatggatctcaagagcattaggctaagtgaaaaaaaccaatctcaaaaagtcacatactgtacgatttcacttgtataacattcttccaggggcaaaattataaacagtgaaaacagattagtggttggcaggtgttagaggcggtggtggggaagtgtgactacaaagaggtagcaggagagatcttgggatgatgggatagttttgtgtcttggtggttacaggaatctacacatgtgatacaatgtaatagaagaacacacattgtgctaatgtcagtttccttgttttgatattgttctgtagaatgtaaaatgtaaacagtggagaaactgggtgaaggatattgggaccccttcacaaattcttgtcaatctacgattatttgaaaatttaaaagtctaaaggctctgggcagggcctctctctctctctctctctttctctctctctctctctctctctctgtgtgtgtgtgtgtgtgtgtgtgcacgtaggttttctattttacatttcaagcagatggccaggcccttggtattgcacaggtgcttgcagtgtgtattagccagggttatccagagaaatagaaccaacaggctatatacaggtatatgcaagaggagatttattataggaattggctcatgtggttatggagactgagaagtcccacggtttgctatctgcaagctagagaaacaagaatgtcaatggtgtgactcagtctgaggccgaaggcccaagaagtacagggctggggggtggggcaatggtgaaagtccaaatgctatgacctgaaagttagtgtcccctaaagattcatatattgaaatcttaacccccaagggatggtatgagaaagtgcaggtatggggaggtgattaggtcaccagggtggagcctcatggatggaattagtgcctttataaaagaggtcccagagggctgcctcagcccttccaccatgggaggacacagaagacattattggccaaaagatgctaacaatgaaccagagagctgactctcaccagaaactcaatctgccttgatatggacttcccagcctccagaactgtttaaaataaattcctgttgtttaaaaattatacagtttgcagtagtttctttagagcagcccaaatggactaagacacagtgggaacagtggcctgaagtgaaactctcttccatcttgtgttaagatggaaactcctgagaggtgatgctcagtgtctctgaatgagggagtgggcagggaggtagagaaggcagaggtcagggagttagagatgtagcttgcacgtcactggacccccaaggggtgtctagatggtgccaggcccagggacccagcctcaccatggccctggactgaaggacccatgcaggctggacagtgggtgattggggaaaccaagaggactgctgaccagggggcttctggacacaagactttgacccaaccctggagaaggaggagcccttcagggttatgtgaaaaatctctctaactatcaagaattccattttgaaattatgaatctttgagatgaaccacaaaccttgcaaaaatttcacagaccacttgagaatgtggccccagcttggggtgttcacttcctctatcagctggagaatttccatggaaagtataggaaagcctgccttagagtccatatgggagatcccagcctgagcctggctacaggctatgcagaggcaggacccaagaggagaccagaaggacaggactgtagtgactataggttgctggctcatgatcacccgggcagccaggcctcagcaggaccagacattggaaagcccacaggacccctgcttggggtctccttcaggtttccctgctccctgggccatgcggcctcagctctgctgtcttctccccacctctgcctctctgtgtacttggctgctagtagccctgcagtctgcggttgctcatcctctgttcagatgaccccatggccactttgctggggagagattctgatcccatagtctgggtcaagctgtctatgcctgatctgaccaccaaggtcataccatacaatcagggctgctgctggacccagcacggggtatggagaagtttgagggtgtggctgtgggcagagcaggtgtccccaaagttgtctccagcaagtggaggagcctgttcacctgtctccccatgagtggcccctgtcaccttgcttcctttactcctgctccagatgcttccacgaagctgagccacatgggaaagcaagcatccctctgccaccctcactgccttggcaccgccccttccatcagatcccactcctgcctgctgcctgcagcctacctggtgagctcatgccagctcagagaccagggctgggcctgggcagagggagtcccatgccttatgtgcaggaagcatgggtctgggctgttaacagcaaagccattgtatttgtccactaggcagccagaacaaagtcccacgcactgagtgacaaaaaaacagacattttttttttcctcagaattctgcaggctgcaagtccaaggtcaaggtgtggggagggttgttttcctctgaatctcatggagccaggttttgctgatggccgccttcctcctgtgtcctcccatgcttttccctctgtgcatgtctgtttcttaaactgttcctataaggacaacagtcgtactggatcagggcccaccctaatgactttgtttaatttaacctttacaaatcctctccaaacacagtacagctgcattctgaggaatctgggttaggactttagtacataaatttggggaggacacaattcagtgcatgccaagctttatcagcagcactaccctctctaagtggtaatttctaaaagacaatggggctctggggaaagactccaacatgttttgaagccaaaaggccccagttccagctggactgcatcgttatgggtagtttgggggccacaggcctcctggcttctgcagagaccacagctgtccagagtgaatgagattcaatatgtcccccctgcccagcacacccggggactcctctatggctgctcctgcaggatgagctccaggcgtctgatgccatgctgggtcaggaccctgtggctcaggccagcctgcaataccggaggggaccttggaatctcgtcatttcctctgacgagtgaggagccagggtagaccatgtgggtgccctcattgttctggggcagtgaccccctgctcatgatccctgtggaggttctgggctccagggacatccaggccagaatgcccagcagttcagctcatgagtccaaaggtaatctgggagtctcaaactcacggatacaattattgcaaccagaaatcctggtcctttcttccctatatccctgcttctgtgggtgggtgggggcatcccaggaggaaaactcttgctcagagagcagatggccctggaggtgtttgtttgacagctgggactccatgaagggaagggtggccccagctcaggctgtctcagaaatgggaaggaacaaagtctgcagaagctctaccctggggcccaggggacagcaggcacaggggctgagaggcatctcccatttaccctccccccagggtcttcctgccttggtggcctcagacatcagtggcgcaggggcctccctgaggactggcatgaagatgagaagggggtggtgacagtccattgttccaggagacacaagtgttacatttgtttactaggccgatgttacaaactgatttttaaaacaatgcttgcagagtcatggaacaaataccacggagcagcacctagcacagaggaaggccccctgccctgggcatctgtgggaaaccagggccccaagtctgcggtgagctggtgcagaaactctgagctgaggagctaacattatacccatctgcaactgagagaacctgccaggctccaacaaagccaaacgggaaactctccccgggagacaccgtcctcatccagggaaaccaggattctcatggaacgtcattttctactgaagaggagcgcagaggaaaaactcccaggtatcccaaagagaggcagcaaatacaagaaacaaggagattcaagtcccagaaagtaaagagaatggagtgatctaaaaggaatatttaaatgagggagtgtgaaatgtttaaacaagataaaggaataaaattatatgacaagaacagctaattaatacaaatgcagttttaaaaggaccaaagttctaaaattcatcaatgagaaatgaaacacaacagagagtttaagacaaaaggtggaataactccaaagacagacctgagcagcatctgccctgcagcactgctgaccgagacagaaaccagaaacaggatattgtgcacaaggagcacatgagaagtgtctagcaggacaggtcactccagcatcctccgctcaccccagcatcctcagctcactccactatcctcagcccactccagcatcctccgctcactccaccatcctcagctcactccaccatcctcagcccactccaccatcctcagctcactccagcatcctcagcccactccaccatcctcagctcactccaacatcctcagctcaccccgttggggaggcaaccattgaactccctctgatttttctcattccctctggatgctgatgcttagggaatgcagaccccagcccaccaacttctaagcaaagccagcaatgagaggagctccctgcttgctggaagggaaggggagtccatcctccctgcccagcctagggacttccgagatgcgctggataggtctttcccccttgatctttagcacaacccagagggtggtgatttccccctttggcatctggttggacaatggatgggcttcgctgagggctggcagccttgttgagcctgttctttcagagagtgggagtgagtgtccaaagggtcctctcagccgcctcctgctacatgcccctgcccactctcctagggttctgctggggaccccagtgggggcaaagctcaagcctgggaaggatggggaaggtctctgggcacaggtggagaatgtgaaataacatgaattcagcacttgccatgtgccaagcaggatgctgagcacatccaaacccccaggacctaaccatgcttacacgctaggagggaaggcacagagcattccagcctgtgcacagggtcaggactggatgggcccctgggtcctggctgagccgtgctgtccttccattctccagtgctcccggcctccagcactgggtggcaggtgctggcaggctgccccacacatcggcctgccccaggctgcccttgcaccagaagttgctgcttacgggactctaggggactctcctcaaactactcaggaccccagcagctcactggaccctctagctgcatggtggccccagagggcttttgtggtctgacctcagtaaatgcaggtgatgggaagatggtgtggggaagctgtgggtctggcctgaattgtgttccctctgctctgccttgtttgctgggtttctgaggtggaggagggatgagggagaggagaggggaatggggtgaagaggcaaagaattttccagtagagggagaccagctgtgagagctgtgtgtctgtcttcctgcatgctcagcatggagtgtgtgagtgcacatgtgtgtgcatatgtgtgtgtgcggggtgtatgtggtgtgtgtgcatgtgtgtgcttgtgtgtgcatgtggtgtgtgtgtgcatatgtgcatatgtgtgtctgtgtgatgtgcatatgtgtgtctgtgtgattgtgtgtgtgtgtgtgtggtggtgcatgtgtgtggtgtgtgtgtgcatgtgtgtgtggtgagtgcaagtgtctttgggggtgctgggattgtggggatgcagcgagttgccatcctgactctcctttgtgggcccctcttctccacaggcctcagagtgctttactacatttatctcacctccctatatctagcaaggggccccaaagcagaagagttgaggtgggaggtggggaatgggtgtcacccgccctggctgtttctctggcttctcagggccacgtgcttcctctccagcccgagaacacggctgtccttcatcacctactgcatggaggacagcatcgtcctgcagctcacactcacactaggcaggggagtgctgctttgagcccccaagggaggcctgaggggctgggccagagggagctccagggagctgaggggctccctgagaccttggttgggagcctgacagcacacatggcaggctggtcaggacaccactcagtgcccatcctgatctcaatgactgtttccctgaacgctccggcccctggctgcactgctactgcaggtccttgtgctccgaaagttctcggcctccctgatcttctccctcccctgccctccctctgccctgcctccttccctgggaggtggctgtgaggattccttgggtgcaggggctggcggggcaagtgtgtgtatcctgtgaacacctgcctatgctggcagctgctctctgtgtgtccctctccgccctggccggtgggggagggagacagggtcaaagccacggggagtgctgaggctttagcgcagggaagttggtgggcccagacaggggagccactgggtggagtcctgagttccaggccaggctgggaagctggagggaggcaggaggaacaagtgtccatggtgctggaggtggcacagccctagggcactgcagagctgataggcggggaggtgaggacacttccaatgcagatgcctggaactgagcccagagggaacgaagcacagaggagaggtgaggacactgaggacgggagggggcctgggcccctcttgcagctttgacggggagcagggaggaggcttcccctctgtgggagacgggaggcttgggtgtgtgcctcctgtgctgtgggtttgggagagagagactgaagtgggcatgagggggaagaaagcaagtctatgggggaggactgtggtgggagatgcagagaggcagtgggggcagggcccttcaaaggctgagtgaggaagaatgggtggctgcctcccctccaacctccctgttcctgggggtcctcccccaaactgaattcccagaggctgctgtgaggaagcggctgtgtctcaaccaatgtctgtgtgtccgctgggccaaatcttcacctggtgtcactgagggtccaagaggaggcggctggaccttgagtactcaagggccctctccccaccatgcctgaagcaaggagcccaggaaaggtctcacttggcccctgcacagggtgggcttagcgtgatgttcccgccctgaaatctgtggtgctctctcaggccccaggggtacaggctgtgcactcagccaggccctccctgatgtcaggtgtaagtggagccacaaggctgcctgaagataccatgtctcatgcctcagctgagcacccaggcctcgatgccttcttcagggctgctgaacactcggggtctctcctccctgtccttctgtgtgcctgtggcaggcaggacacccacagcggcagggccaggacacgggtgcggcaggcgagccacttaggaccctgctcagggcaatccatcacagaagccctgttttagctgcgattccagagacctacaggtgattccccatctcctgctcttcctgatccaacaaggaccaccgggcacccactctgaggctcagggagtgtgtccttccaccactgtggctcctgccctgagacaaacaccacaggggacacagggcaggtggggctggccccaggagccagctggggttcccacaggtctgcagctgccaagggcattggcctccaccccgcctcctggccctggccctgtgcattccaatccctgctgacgcctggggtgcccctggtctatgcacccaaggaaagctttctctgaaccctgcttcttgtctttctgcagtgtcacaccttcaaggcgggctgtgggtgaagctggcctgccgacatgctttctgaggctttcaaggattttcaaaaacgggagcccacagttaaaagcccaactttgacaggcacagtggctcatgcctgtaatcccagaacattgggaggctgaggtggggagatcgctttagcccaggagttcaaaaccagcctgggcaacataatgaggccctgtctctacgaaaatttttaaaatttagctgcagtgagccatgatcgtgccactgcatgctggcctgggcaacagagtgagaccctgtctcaaacctgaacattctttctaaaaatgcaaatttctagattttttgtaaaatgggaatggcaggaatagtgggtgtccctccatgtcggcccctggctggggcctggggcttcaccctcctcacatggggagctgcagggcccaccttcattccaaggccttccaactgccgacttcagctggcttgtcctggcctgctcctcctcatggtatctcctgtttggcctctgaggtcacccatccaatggccatgatgcttccttaggaagaaacttgtgggggcactgagactgtgagagagagagcaggaaaggccagcttggtgccctgtgctgagctcccaggcctgggtcccctcagtgcaagcattgggtcctctcccacagctgaggccaacagcagctgcttccaaatgtgatgctcccaggctgcactctcaacatctccctgctcaggtttctaaagggcctttgccagctggacactggaaggtacatctgagcctgggtggtgcacaccttggccagcccaactcggctaccctgagcagggctaggggctgctctggaccttcatggaacgggtggttccaagttacattctgcctctgtccctggcctccttcctgggctccctagaaccctcctggcttcttggtggcagcctgctgagagggctcattctgttgcatctggggttcaagcttctgccttggcctttccctgctgtgactgtcaccctccatgtggggcagctttgcacaagtcggccaactgacaggtcagtgctgtgactgccgggccacgtgagcagaggcagagggccgagctggtgggcagagggcacctgtcaccttgactcagctgcctccagggaggagtgacgactcacatcctcacctggggttgccagggctgctcagacgccacagcctgtgcatgtccaggggacatcatcagaggagcgcagctgtcacactggctgcacgactgagcagctttaaatcaggagcaacagaaagagaccccgacggggaggggaactctctactccacccccatcctcagctctgcatcggggagaggcagggtcgaggacagagcccaggaccaatcatggaagtgtcagcgcagctcctgtttctgggacctaccagctcccagccctgtgccagtccccgcagagctcagtgccctgggactcaagacaggcctaacagcgtcctttctgttcatgggaggcactgctggagcttgctgacattggacaatttgctcctggtagtgtgcccatggggagcagagctcagacatgtatggtgtgtctgtccccacagcctactgccagggcaccctgcagtgagaaacagggaggctagagcccagctgctggtctggggccagtggcacccagccttatgctgtccccatggagggaggatgcccagggctcccttcctctccagcagctgcagctgtgtaaatgctggtcaagcagagccccagcacacacaggcagaggtcaggacagatgaggtcatcacagaggaccacacagggctgtcaccacccatgccaggaccctggatggtaagagggcatcctcaccatgtcccagacagcagagacagatgctgtgatttatcctgtggggccaaggtgagctgagggtgtttgtgtggacgcctttgttgggctatggaggtttccttctgctcacaggatgctgacgcccccacttcttgttcttcatcccctgagataaccgcctggttcctgtttctcgttttgttgatgtggtaaattacacagatatttcagctcctgcacctgcctggccttcctgagaggaggcctggctgctcctggcctgtggtctgggttagctgctgctccatgccatttgctggtgtttccctgagagcttctcacacatgtcttttcttgctttagggttaaacttattgttgtgaggtaacaacacaagaattgtacacaggtactcacaccaccaccgctgcatattccccccacagcaatagacactcacattcacactcatgtgggccacacatccacacccccccacccatgcagattgcaccacaaacacactcaacccaccccataccacacacatcacaccacacacacatacccaaagcacacacacacataaatagcaaacacacatacaccaaaaataccaaagacacaccacacatcccatacacacaccacacacatcacacatcatacacgcaccacacaaagggcacacattcccctctctgccacacaacacacacacccagcatgcacccaacaccatacacagcacacacacatcacacacacacacaccccacacacactacacacccagcacatacacatactcacacaccatagacacacatacttgatacacacagaacataccatacaccacacacaacacaccacaagatacacatacacagtgacactgccacacataccacatatcacatacacagcaaatacacacacatcacacatagccctatacatgtacacaagcaccacactcaccacacactatgcacacataccacatgcacattacctatcacacgcacccactacacacacacacatgcaatgccacacacataccacacacaaaacacccacacatcacacatgaccctctacacgcacacagccaccatacacactacaaaccatgtatacatactacacacataccacctatcacatacccccaacacacacatgaccacaaacacacaacacattacacaaaaatagcacacacaatgcaccacacaccacagaaaaacacacactagacacaaaacacacacacattgaaccctcacacacaccacacaacaaatacaccaaattcacacactgcacacccctatacacacatacagacagctacccatactacatacatgtcacataccacacacaccacacacacacatcatacgcagcacatgcacaccatcacaacacacacatactacacaccacaaacacacactacttacacatgtgccacaccacacagaaaatgcacacacatatgcccatcacataccacacacatgtagtacacacacacccacacaccacaaacacacataaccacatacacaggcaacacacacaaaccacagccttttcctcacccccagacgtaggcacagacatttctgccctcagcagggcctcctcagctcttacctcctgcacacacagtgggggctccgcagacctaactgcagtgcaggcctttgatgtgagctggaacacaggaggggtggagcagggcagggagagtgagcctctggccataggagccaggcgcctcagcccctcacatcagcccactcatggcatcaatggtgcttctcagggccttgaagccattctccactgcaaacacatggtccaggctgtctgcaattgttgttatctacagagatgggaggtggcttggactcccggccagggggtgaggatgcagcagatcccaggctcaggggacaatgtctgtctgctttgggggcagcagaatgtcaggctctgagggccacaggcttctccagccagcagcccactcttggggagcggaggagctcttcagccctcccctctggtgtggtgggatttatacgatctgctggtcaatcacttctgcagtggccatgggtcggcccaactcacttgtggcaggttagatgatggggtggccctgggagagccacttgggacacctttccccagtaggctccagagtgacacctgccacctgttctgagtcacccgctcctactcacattggctcatacccacgatgtaaatggtggcccccaggctgagatttatcagcccaggagaaagaaggtgctgagtataaatcacccagggactctggtattccccctacatgaccaccatggggacagcaggtgcttacatccagagttgaaatattccatcttctgaattgccttcaaaggaatgaagaaatattgagcctggacagtgagatgaccccagcaatgttctaagaacttaagaaacttgaatacattatctgtgctctagtggtctgtgccctttcaaatcctctcagtatgaacatttctcctgctggcaacatgtacaaagagccctacatatttctttttgaaaaaaaaaagtaaaaagagggttgagatggagtggggttgactgttaaaaatcggcttccaagctctccaggagccactgttcattgtgcagggcttcctggatggaggagggggccaggcaaggtctctgtcctgctcattcctcactgtgatgttgactagagatttcaaggccttctgagctcatcccagtctcagggaacacaggcctaagtgacctcaccaagggccccacctggaccattgatggtgagagaggaagcttcccatggatgtgcaaaggcaactcaggctctaacagtggaccaacattcctagccctaagcctaactgcaacacagggatgtgcagctgaggtcagggacaggcaataggacaggccttcctaaccatagccctgtgggctctcttgtattgggcactctagccttcaacaggcagggctgagttcaggaaaactcagcccccacagctccatacccccgaccctgactcagtctccccttgtctctttgctataggaagcagcaaaccagctcaattagagtgccagggctccttgacttcctgtgcccctgaaacaaaaagaccaaaggactttgttccttatttcccttcttattgtttatatttgtgattgggttgttttatctaatgattttcctttctctttctcctttgtgtataagttataccagtgagttttatagttttgcattttttcatcatggtggttattatctgttcatttccagatacaagacttccctgagcatttcttggaagtcaggtgtagttgtgataaatttcctagtttttgcttgtctgtgaaagattttatttctccttcattcctaaagagtaactttgctgggtataatattcttggctgttagtggttttctttcagtactttgaatttatcatcccactctctcctggcctgtaaggtttctgctgagaaatctgctgttagtctactgggtatttccttatatatgacttgactattctcttgctgcttttagaattctttctttgtctttactattgacattttgacaataatgtgccttggagaggatctgtttgagtcgaatctgtttggggttctttgaacttcctggacctggatgtatctctctcctaagacttgggaagtcttccaataatatttcactagatgtattttcctcatctttccccttctgcttttcttctggaattctcataatattaatatttgttcacctaatggtgtcctatacatcctgtagatctttgtcaatctctttcattctttgttgtgtgtatcctatgaatatgtaacagtactatttgtcagtgtattaggccatttttgcattgccataaaggaatgtttgagactgggtaatttataaagaaaacaaggttaattgactcatggttctgtaggctttagaggaagcatggtgctgatgtctacctggcttctgtggagacttcaggaagcttccattcatggcagaagatgaaggggaaggaggcatgtcacatggcacaaacaggagcaagagagagacagcgaggtgacatacacttttaaacagacagatcttgtgagaagtcactcataattgtgaggacaatgccaagaggatggtactaaaccattcatgagaaatccacccccatgatccaatcacctcctactaggcctcacctccaatactggagattccaattcaccatgagatttgtgtggggacacatatccaaactatatcatttggttaaaaaataaagtatatagtacagagtctataaaaaagactggaatgggaagccacgtcaaaaaacaggacttgtatagctgacgttgccccaaatctggaaggtcccccaggactgaggtgggtcctgaggtgttaggaccacagggctgctggtgcatgcagctctgtgcatttataagatgaatctatcctgtactagatttgatgggggatgctctaccttgctctggggtcatatgtctaaatggatggcattatatgaaatttttttcccccagtgctggttccaaacttgtccacaccattaaggtgactaacgtactggataagtctgatgatgaaacctgatggcaagggccttgttttctacccaatacaggctgcagggcaaaccatttacataacataaaagaggtttgtgggaaagacagtatcaaaaagtgtggaggaaggggagatagatggttccagatacaccagctacccatcttcagaggtcaccctactcagttcacaccctttagaaatgcttccccattgcctgcaggatccagtccccatgcccaaccaggaagcagcagggggcttcagcacagggatgaagggcgtgcttgagtggccagtgttgagggggaaaagatcccagagttcctgcctggtgctgccctccctctccttggtcctggctctgtctgtggtcagatctcttgcttcctcctgggagtgtcaggctcatatgcagcctcagtgggcatctggggaagccaggcctgtgtctctccagagtgtggggcacagagaagccaaaacacagcatccagggggaggaagtcacctgccagcagcctgcactgccttgcaacacacggccctcatcccatccccaccagggcccagaaaggcctgactgcagccccgagtggccaagggatgtccaccatgggtcctgggctgctttctggcctgttcttgccttcctcttctctattccctggtctcaggcaccttccctcaatgagcagagcatggtcctctcacctgccttacccttgtgtgcccccctaaagcagggctcctttcccattccaccagctcctgcccaggccccattcccacctcatgtttcaattcaggacctgtactcagccagcacatgtccttccaacttttgtacttttcctctaaaactatccctggcttctcctcctcctacatcaaaaataccgttttatttccagattccaaactctctgtggcccacagtggccatcccctaacccataaggctgccaggacccctcccccaggaggagactgaagtcttatctgggtgtgtttctggggacagagctgaggtgagctgaaggatcctgatgccttctggaggcagtgtctaagctgcattgcttcctcatgaccacattgcttttcagggcagtcaggatactttgtgcaaccttattcaccaagctgcaaccaggtgccatagatatggtgccagtgcaggggctgggtgagctggggcacagagaccttcccagtgggctgaaggccatggcttttgcccttgacaattgccctctgggatcatggctcttcagagagccatgtcaggcatctgctgaggagggctgcacaaggcacatcgaaatggtgcccatgggccccccagactgtgtctggacatggaacccattcatttcatttgctggtcacttgaggccaggaatgctgctgggtgtgtttgacaaggttgtgtgggcaaccctgacttgttctaacagggagtaaagataccctccttggtcatcaccttggaaccatgagaaagcaaattgttaagattgtcctcctccttgtaacataatgaggactaatacgtattgagtcttcctgtgggccagttgctagactaagaactttccacgttttcactattttaatcctcccagtaactatacaagtaaatgctactattatcccagtttactgaagggaactgaagcacagagaggttgagttacttgttccaggttacaaagcatgagattcataaagctggatgtgaactgggtctggctcctgctcttcacactgccctgcccctctttggaccagcattcaagacctggtgatggttactcccaaaccactggagagcttccctgctcgggccctggttcctgggtttgcctggagctcatcttcctgtgcttcccgtggtcagatccttggcccagactgagccaggagcctgagggatgatctgatcctcagggtctgtggtgagggctgcactggacacattccctggatcagcccaataaggaacagaggagatcactgaccaggaaggaaggccctccttgggcctaggttggagtctggatgccgtctctagggtgtgaagagggggcttcaggctgcccatgattgagccactccaggaaggcatagactgtcctggtacatcctggtggtatgttccgggctctgggcccagctggctcgtagttaggagtggcggtgaaggtggaatgtgcttttgagccgtcctgagccctgagaagaggtagagagaggctgttgttgtacctccaggctgaagtctgggccaaacctgtagacattctggtcattcttgctttgaattcagttctgagcttggtgtgacctggggaagggaagacaatggttctgtgaggtgaaagagctcccaaacctgtgtcagaagaggagagagacagaaagagacagaaaatgtctatctttagtgctggggaaagagactcagccaagtgctcgtgctctggggctttgagatcagagtgctccctccctcggagcttcagggaaggcagtttatcagaggcaagatcagagctgaggctcaggcttagaagacagctgagccttggcgtgcaaagttagtagatgcagagaagagccctcaaagcagaggggtgagggagggtgcctgagacatggtcgggtcttctaggggctggggatgtgggtgcctggagcttctgctttcagatctccatctcagcccctgctgtctgcagctgttgtaagctcatctcagctacaaggcccacttggtgagctcttttcatcattctgcccaaagagcttgcttccagggcttcaggtgccaccagcatttccccagagttttcatggtggtaagaacgtggctcatgactggtcctttttgtttttgtaaaaaaataaaataaaattttaggatcttctaaatatattatgccaaaggggacgctaagctctggaaactgagtcatgtagcatgcttgcaattctgcttcttagattatagcttaactctcttcctcgttgttctagttctataaatgactaggagagaccagagatcagacatccctctgtccaatcactgatctttgttatcaattacctgcctcctttattgtcctgtttctgagaccagacggtaaccaaaataccttgatatttacatcttcagtgtggaatgttaaatctacctttcccaaaaagaaagaccacctcaactaatcagaccattgtaagtatgcagtacacctttttaagattttgttaaacatcctgaaatttgtctatatgaatgatcccaaacttctacactttggaatactgacctccattctttggactctgtgctttctggtcagcctatccttacactttgtgcttgaataaactctctttaaattgtattttgaccctttgattattttagattgacgttcggccaccttgaagggactcaaagtgcgcctcaactgatccctcctgttatgtcatcgaccaaggctttggtgccaagatgaatgccttttcattcgcccaacttgcaaggactgacaggaatctctgccatggctcctcttgggtttcgaatctctctaattttggtttgagattcagacattattttagtgatccagttccacatttgatggagctagaattgaagctctgcttttaaggtaggagtttcacacacacacaacattagaatatatatattagaatatatccatatatattaaaaattctgctgttcatggatttgtgatttttacttttctctaaggttgcaggttgcttgttgaactacccttcagagtttgtacgtccttttctctcaccacaattttggtcagggaagaaaatagtttccttctctgaaaagaggaggtgaatgtttcatagcataagaaatatttaagaagtatttaagaaataaatactttttatttaaaaactggctaaacgctgaagcttggttcatttggcgtatgtaaagtcactttatgagtgagcaaaaccaatgagaaactttctttgaggataaagatgagtcctgggataagggaaagttttcttctttgccaaaaggaacctcaagcaattaaggtcttgcagaagtgtttgacttcattgcttgtaacatgcgattgagttcatggcttgtaacatgcgattgtcccccaggtaatctccaagaagaacatgcagtgaagcttgtttaccctggtgggcacataagaagggttgttcttccagtgccgtaagtgctcatgattcctggatttagtgagccatgtaaaagagaagaagtgacacaagagtgacaccttgaggagtaaacccccttaagcagcacaccagatccaaaacatctttccctttcagtctttggtcacttgaaaagataatccatttttttcaagatggcggactagggacattggatgccagatctccttaggaagaaggtcttaagttactgttaaatggacaagttctgaactgaaaacagagggaaaagagccaggacctgtcatcgtgcccatagaaagaagctgaggcatggaaaaggaaagcagcaagagtctcgcagagatcaacccccaaggaactcagagccctgtggaaagtgtaggtgggagtgcttctctgctcttctctcctctgtgacaatctactgaacgcccaacttttggagagcaccttttcgcttttgacccagggaaacactattggtagctatttgagaactccccagggacagcaaactgcttggccagcttgtggaggcatgctcacattgccctcagaagcaaactgagattgtgggcaccatactgagtgtgcattgatggtgctcctaccctgactgagaattttctgcccttgagtcactgtaccaccagatccccccctgctctcactttggctagcatggctggtccccagggagttgtgggactccctggagatctaacccttggggtgggctgcccctaaaggaagaggaaaggaaacacagcctgccaaagcccctcttaggataaagagtatgtgggtgtgggccaactgctgcaggggcatcattgatgactgggaacaaatgttaggaggggtttcatctcccacctcccccaccatacactgttgtggatgcaaaggtggtcgtccctgctagggatggtgagcatgaactcaaggaaagtgctcttcatggtggcaccacccctactgaaagtgagcctttgcctgcttccagctttcatgaaggcaaaggcctaactccctcatcctacacagagcagcagcatcctggcaatggaggatagaccatggagttgcctgccatggactaggggaagaggctctgcttcaggccccattttagtgatattcatcagagaggtatatccacagcccccagccacagtgtggctgggaaccaaaggatgaagcctttataaacagaaggtcatgggtcctgtgacaggggtatcgtaggaaagtggatcgcattcctgtcggctcaggatggggatttgcagcacccaccttttctttgcctcaggacctcaatgcattccatcataatctcttcctggtgtattcagggcgaatgcatccattcagcaccagccagcctgccggctcttactcttaagtgctatctactggacagtagcctgaactgcatgagcaaacaaaaaacctgccaccgcaagggcttagtgccagtccatgaaataagcctcctgagacttccacaccctcagccctgcaggagatactgtgtttgcccttacacccaatacatagctataagaagcaacacctaagaaagccactgcactgaagctatacacaaccaattaacctatacagagccttggtcccctgaaagcacccagagatgaagccacacaatcatatacaacatacatgacagccacaccctcaagagaaaaaaataagtttacaaaagtcccatttaaatgacagaaaattcaaatttaagaagctacggctccctcagatgagagggaatcagcacgattctgacagtacaagaagccagagtgttttggcaccttcaaaggatcacacagctgctagaaatgaatcctaatcagactgaaatgtccaaaatgacagataaagaattcgaattctacacatttgtgcatagaatctgggaatgactattaagatttatttattccctctctaggtaaaatccctctctaggtatataaataaataataaataaataatcagtttcagccgggcacaatggctcacacctgtaatcccagcactttgggaggccaaggccgatggatcacttgaggtcaaggagtttgagaccagcctggccaacatggtgaaaccccatctctactaaaaaaaaaaaaaaatgcaggccgggcatggtggctcacacctgtaatcctagcactttgggaggctgaggtgggcgaatcacgaggtcagattgagaccatcatggttaacatggtgaaaccccatctctactaaaaatacaaaaaaaattagctgggcatgggtggcaggcacctgtagtcccagctactcgggaggctgaggcaggagaatggcgtgaacccaggaggcagagcttgcagtgagccgagatcgcaccactgcactccagccttggcaacagagtgagactccatctcaaaaaaaaaaaaaagggcaaaaacaaattagccgggtgtggtggtgcccgcctgtaatcccaactactcgggaggctgagacaagagaatcatttgagcctgggaggtggaggttgcagtgagccaagatcctgccactgcactccagcctgggtgacagagctagactctgtctctaaataaataaataaataagcaggaagggtaggagagctctaaatatatgcacttgttagcttatatttatgttcagagcctcaggaaatgagcatacacaccaggcttaaattgggtattccaaggatcaggttggggatagggagggaactattttaaaatacatctcttttacatgtgcctttatattgacttaaaattttaaaaattgagatagaattcacataccataaaattcagtcctttaaaaagtatacaatttggtggtttttactgtactcaaagttttataatcacggccactgtctaatgccagaagattttcatcagttcatttctattgacttcttatttctttctttttaaaaaattttaatttcatttcattttatttttgagatagggtctcactttttcacccaagctgcagtgcagtggtgcaatcagggctcactgcagcctttacctcccaagctcaagagttcctcctgactaagccccacaagtagctggaattacaggtgcacaccaccatacctggctaatttttgtattttttgtagagatgaggtctcactatgttgcccaggctgatcttgaactcctgagctcaagtgatccccttgcctcggtctcagagagtgctggccttacaggcgtgagccaccgcacctggcctatattgactttttataacaagcatgttgtacttcggtagtttttaaaacataaaaatgattttaaaaaccaagaatcacagtgatttggcagagcagtgggtcttttctggaaaagagagtcttgcctacccatgctgtcagggttagtcaaatgcccaggctttctggcaagtcagtggtagatttttctctctgctttcatacaaatgggataataaaaatttatcagccattttaagcaactgaatgaaaataagttttgcctttaccattttccttgttcaaaatcctgaagttctagtttcctagttgataaattacatcagttgacattctccataacctggggtcagaatactgtatcattgcccatcaacattattaggttaaatgaaaaggtgtgaaaactgatatcttactgtttttgcaactcttggtttacaacgaggttaaagtttcatcatgtttcctagtcatttgtatttaaaaattttctttttttttttggtgaatggactattctttgctgtttgtccatgacccactgttacggacacgcacctggtagtggtctcagccctttgctgaataaccatttccttccccatctttgtccttagttactgtgtgaattcttatattgtgatttatttccaatgacgtgttgaccttttaacattgagtttgcttccatatttagcgtgtatatgatgaagaagtggaggagccagtactcaaggctgaggcagaaaaaacagagcaggtacttgtataaaatcactcttagctgagtttctgactttgaaaaatgtggtggagatcgatgtgttatgtgggaactgggggatggtgggcggggttgggaaagggagggactgctcctgacagcagcccaagaggggattctttcctttgtttctgaaatgtagtgtattaactaatacagagatcaaatccttgaattctgatataagaatagagtagaagtcagcaaacttcttttgtaaagggccagatagtacatattacagatttggagggtcacagaggtcatttttttcctgtggcttcctgagttacagatggaccagccttcttcctgagatcttctcacaccagagcccaaaacatagctaagaggttctgggtcacactgacttcttagcactccagcagagatttctttttcttccactcaggaaggcacatggactgtgaataagtttattattggagtagctttgattttgttctcatttattcagaaaatatggatcacctgtaaaggttggccctttgtcagcaattattacttgtaacagatgaagctgttagactaggaaaagggtattcgaaaccagctatagttctgcctgttgccagcattttttaaaaaaagttattttattttattttttatttaaaaaaattttttattttgagatggagtctcactctgttgcccaggctggagtgcagtggcacgatatcagctcactgcaacctctgcttcctgggtgcaagtgattctcctggctcagcttcccgagtagctgggactacaggcgtgtgccaccacgcctggctaatttttttgtatttattgtagagacggggttttgccatgttggccaggctcgtctcaaactcctgacctcaaatgatccgccagccttggcctaccaaagtgctaggattacaggcgtgagctactgtgcccagcaggttattttatttttaatagaactcaaggatttgctagccatttaagtgcagtagtatctggttataccaattcagggtttaatttgaaggtgataggtatttagtgtactatttttaaaaactgctatatatttcatacacattttcacaaactcagtacaatattagctatttaactcagaatcaagcatatccaaatagaaaaatacacaaccaagacaaaaaagttcagttagaaagacttcagtacttgagataaaagactaaaatgctcgtagggtttttttttttgcctttggccctcagaacaacactgtgtggtttggttccttctagaatatttgtagagggggaaatgacactaaatatttttcggtatttctcacaatggcacacttgtgtctgcggggactgccattgagaactgctgttgcaggaagaagacacctgagggagattctcagcctgttggtgatatgaacaaaccttttttcttgagtggggcattgttgtagggtatacacagaatagaccggagatgaaaatgacccccttttgatgtagaacagatttataaaataattgtaattgtccagtattttttttttgtctctttaaactgtaattgaaaaatgagacctctgtgaccttccttctaagtcttaacacctaaaattacccaagggataaccagggctcgtgggatagtcatggtgagtctgagagtctaggccctccagcagtggggaaacagcatgcattcattgttgggatacttctccacacactagttgtacctctgcttttgtagacgatgacccttgagctctggaaccttaggtagtttgatgcatgtccagaaaggggcaaacttgggatttaaaacttgcagtcttactccaaagtctgtgtcaaggcattcagcagaatttgacttttttaacatttttaataagtttttttggagcttgaggctaggctttagagaacattcacagtattcttttggggcagtatcagtatattggagacccatactgcatggtatttattttgtaggagaagacacgagagcagaaagaagtagatctcattcctaaagtccaggaggctgtgaactatggcttacaagtattggacagtgcctttgagcaacttgatatcaaagcaggaaactcagactccgaggaagatgatgctaatgggcgggtggaactgatccttgaaccaaaggtgaagacattcaacttaaatatttattgcacaactattatgtttgggctactttaattgggcacacgattagtaagtcatggacttaacctctgggaagtgagtatgtcacttagtagtctcacattgactccaccagaaagactcgctttacctgagcactgatggagtacttgtgaggcgcaaggcaacatgtcaagttggggtgcaaagatgcagagcatggcctctactctcgaggtgtgtgttgcagtctggtgggagagaggagacatacatacgaataaccattgtaaatgccctgagagagaattgacttccagctggaattttggggcaaagatgatatttgaattggggtttgaagggtggggaggctcaaaagagacagagagtgttgggaacctgaaattatgtagcttgggctaaggaagactgcagaagaactgaaaggcatttgggttgtttccggtttgggcaattattaaatacaaatgaagctgctgtgagcattcatgtccaggctccctcatagcctagtgagtgttggttgcttgacagactttctcccacattgttcaaagagacaattggggtgacacagagtctctcggtagtgaacacagaaagttaccacagtgacacacaaggccttccgaattaaaacatgccacagaaccaaacccttttttttttttgagacggagtttcactctgtcctccaggctggagtgcatggcacgatgttggctcactgcaacctctgcctcccgggttcaagcgattctcctgccccagcctcccgagtagctgggattacaggcgcccaccaccacacccagctaatttttgtatttttagtatagacagggtttcaccatgttggccaggctggtctcgaactcccgacctcaggtgatccgcctgccttggcctcccaaagtgctgggattacagacatgagccaccgcacccagcctgaaccactcttctagtcattctgtagctgcacatttctcttccagtttgagctttgctgagtcacaccaaattgaggcagatcatttggcactgaccggtacacttgctgcttggattttcactgtatgcctttaaaagtcagcagtggactctgggaaatggattgcctggaccacacttgatacttccaagacacacagcactttctctctttttttttccccttgcagaggaagttgtggaggtacacttttcttttgtaggaggatttggggatgtcttctgagtcagtgagaattagtccaaattaacgctgtctttgccttatgctccattggttgctgtgacgtcgttgaacctttactttaaccttcccaatctttctgttgttgtgtgaaatgtcagaattattctcccctgccccagagtcctttgacaaggaagagatatcattgccaaagggcaatgcctcacaggggacagggcagcatttccttcagcagtggaggtaggaggctgtgcaagggtggagcactttcttgaccctattttttttttttttttgagacagagtttcactcttgttgcccaagctggagtggcgcaatctcggctcactgcagcttctgtctcctgggttcaagtgattctcctgcctcagccttccaagtagctgggattacaggcatgtaacatgacacctggctaatttttgtattttttagtagagacggggtttcaccatggtgaccaggctggtcttgaactcctgacctcaagtgatccgcccgcctcggcctcccaaaagtgctgggattacaggtgggagctactgcaaccgaccaaccctaaatttttaatgtgtgtgtggtgtgggactgacaggagtagacggctgacatgggcagatctccagcatgtgctgttggggccacagtctcctgccctcactctgttttctcatctggtcttattttaccaacttcacttttctaaattcaacagtgtggaaccactagggggtattgttcttctgtttattgagttataatcttttttatttatttatttatttatttattttgagtcggagtttcgctcttgttgcccaggctggagtggagtgatgtgatgttggctcactgcaacctccacctcctgggttcaagagattctcctgtcttagtctcctgagtaaatgggattataggtgtgcgccaccacacccagctaatttttagtattttcggtagatattgggtttcaccacgttggccaggctggtctcaaactcctgacctcaagtgatccatctgcctcagcctcccaaagtgctgggattacaggcatgagccactgtgcccggcctaatctatttttatattaaaatatatagttatattatgtctcattagtactgctttttaggggacagctcaccagaatgttcagtttctttccttggtcctcctcttcttggaccttatactaggaggttgtacccttttccctgtttgcttgctgctgatagacttttggtaggcttttgccatttttgttaaattttgttaattaggcccttggggagggagattctgtgtgatacagctttactttggcatcttttttttttttttttttttgagatggagttttgctcttattgcccaggctggagtgcagtagtgcaatctcagctcactgcaacactgtttcctgggttcaagtgattctcctgcctcagcctcccgagtagctaggatgacagttacccgccaccatgtcccgctaatttttttggatttttagtagagacggggtttcaccacgttggtcaggctggtctcaaactcctgacctcaagtgatccacccgccttggcttcccaaagtgctaggattacaggcgtgagccatggtgcccggccttaccttgacatctttacctaggatttgacttttaaaaaaatcagtgaaaaaaagaattttttttttaacttttagtcctgctgtgtttcttattctccaccttcgttatgtagcttgtttgggatagtcagatggaacagggtatcaggtggcacatgtaagtttgttttcaactgaaatgtttgacagcctattcctttcatgatgtacaggatctatacattgatcgtcctttaccatatctcattgggtcaaagctgttcatggaacaagaagatgtaggtcttggagagctgtccagtgaaggtacttttcttcaccaaataattttgttccttaacatttcttttttattttaaaataatttcaaattttacattaaagtttcaagaatagttcaaagaactctcatatacccttcacctgggtttaccagttaacatttcaccacatttgttagattgttctctacatatacgtaatattttgtcttgagcctatttgggagacatcgtgctcatgccctgttacttctaaatgtttctctgtgtgttttctttttttcttttctttgtctttttctttttttgagacagagtctcgctctgtggcccaggctggagtgcagtggtgcgatctcagctcactgcaacctccgcctcccggatttaagcgatttttctgcctcagcctcctgagtagctgggaccacaggcgtgcaccaccacacctggccaatttttgtatttttagtagagacggggtttcaccatattgtccaggctggtctcgaattcctgacctcatgatctgcccgcctcggcctcccaaagtgctgggattacaagcatgagccaccgtgcccggctgtttttctttctttctttctttctttttgagccggagtttctctctggtcacccaggctggaatgcaatggcgcgatcttggctcactgcaacctccacctcctgggttcaagcaattctcctacctcagcctcctgagtagctgggattacaggtgcccaccaccacacctggctaatttttgtatttttagtagagatggggttttaccatgttgggcaggttggtctcgaacgcctgacctcaggtgttcctctgtgtgtgttttctaagaacaaggacatctcttgtataatcacagtagaattacaaagccaggatattttcctggacataagggtattatccaatctgctgctatgttcacattttgccgtttgtcccagtgacaccctttacagtctctctcttttgttctgtggtccgggactcaatccaggaccagccaccacatttggttgtcaaatcttcagttatcttttaatctgatgccatttctcagcctttctttgctttttatgaccctgacatctttaaagagtacaagcaagttttttttttatttgtaatgaataatttttggggggagagatacttcaagactacataaatatgtaattcctcaccataatgacactttcaattccagtaagtgggtatagatggttttatcaagatctctgtgatgctgttgtatggtggtttgtgattttgagctaaggacattttcttgtgaatattggtgtggtgacccttatctctcttctcaacagaaggctctgtaggcagtgatcgtggcagtattgtggacactgaggaagagaaagaagaggaggtaagggctgtttggtatgaccaggtcacggtgggcagcaagcttaatttaagatgggcctagcaggctaagtaaatagcataactgtgaattcgtaatctgcttccataaagcttttaacagtgatagaagccacattctgagttttttttcccaagggttagatttcctttttgccttatgtacaataatagggaaagctgctttcatctcttccactattatcctctctcccaccttgccaccaaatatctctttcacccaatatatttttgagaagggcagcttagatgttttggtggaatctctgcctgggatatagtctttgagtatattctgtctttgaataattctaagggaaaaaatctacatttagaacttttgtaaactataaaacctagagcaggatataccgaaagccaccacttacattctattttgctgctgccgctagcgctttcatatccacagagcataatttcatttccttgtctagagtttgagtctgtgggccttgactacagttgaatctgtagttgttctttagatgggatattcgttattgcaaaggacacagccatgttgcaggagagtcctcgagtatgggatttccgaaaggagacagtgttgtgtatgtgcttttctcttctggttggtccccctttctgcactctccctgcccgcctttcttccagtcctccaaagaaaaacctgacagcaggaaatgagcttttcttaagtaactttcgtataacaaaagcagtgctcattaggggaatcccttgcttttagccaccgatgtggcacttctatgtggcacttcatcaatagttgcttgtagcaactattgatgtccccttcttgggcctaatgaagtagttatttttattattttttttattatactttaagttttagggtacatgtgcacattgtgcaggttagttacatatgtatacatgtgccatgctggtgcgctgcacccattagctcgtcatctagcattaggtatatctcccaatgctatccctcccccctcccccgaccccaccacagtccccagagcgtgatattccccttcctgtgtccatgtgatctcattgttcaattcccacctatgagtgagaatatgcagtgtttggttttttgttcttgcgatagtttactgagaatgatggtttccagtttcatccatgtccctacaaaggacatgaactcatcattttttatggctgcatagtattccatggtgtatatgtgccacattttcttaatccagtctattattgttggacatttgggttggttccaagtctttgctattgtgaataatgcaaggaaatagagacagtatagtccaaaatgtaaaataacacaaactgactttcagtaatttagttagttaaatgtgcaactctttaaatccaaaggcaagagttgaaagtgcaggtgatgtgaacaaattgttagaggcatttaagtgaaccacaaaaattacatgttaactggaacaacccttcacaatattgccagctacccagcttatctgcaccttgatacttaaggtgaccagtagtcagtacaaagagactgagtgtcagagctttttctccacttgacatagaatcagcctgccccagagacttagacctgcaatcatttctgtgcttctaagtaaagcccatttaacaacaaagccttttcttccccacaaaggagtcagatgaagattttgcccatcatagtgacaatgaacaaaaccgggtaaggctcatatattgaaatgactttgtttttacattttaattgaagcatagtatatatactaatattactttggaatgatttatgaccaagtgaggattttttcatgtatacaatttattttcctttaagcatttcatgtatttaggctaactacctcctttgtatatattttttccaattttgctttatagtttatttttcttagaaaagaagtttcaaagaagtgaaaaacacaattggaaaacagagcctctaaaagaagactcagttacccaaactgaactactttgcatgagtccctcttctgttttaaaattggagacaatctagcagtaacattattgagtattcacaagatgaaaacttcttaccctactgtcttagcacggttatcttaatttttgaatagctaaaggcgtattcttttcatagtgtgcatctttcattttctgccattttatgttaacattttataaatgtatccttatttattattattatttttttgagatggagttttgctcttgttgtccaggctggagtgccgtggcgtgatctcagctcactgcaacctccgcctcctgggttcaaataattcttctgcctcagcctcccgagtagctggcattacaggtgcccaccaccatgctcagccaactttttttgtatttttagtagagatggggtttcaccatgttggccaggctggtctcgagctcctgacctcaggtaatccacccaccttggcctcccaaaatgctgggattacaggcgtgagccaccatgcctggcctccttattttgaatagcctttgcagtttgcgttgtaaacttctatacttttaaacatactgagtatgatactgtcatagtctctaaatgtataagggaaagagtttatttctagagttgtatttttgatgtaataatgtattcaatattttcttttcttttttttgagacagagtctcgctctgttgcctaggctggagtgcagtggtgtgatctcagctcaatgtaatctccgcctacagggttcaagcgattctcatgcctcagcctccctgagtagctgggactatgggtgtgtggcaccatgcccggctaattttttgtatttttagtggagtcagggtcttcccatgtttcccaggctggtcttgagctcaggcaaaccgcccacttcgccctcccagagtactgggattacaggtatgagccaccacgcccagccaatattttcatatatagaaatcctttgcttcggtgaactgtttcttcagaatgaggtggtatagagttatgttaataactcttaatgtctgggggacattctaaattaagtattatgcatgtagattttcctacaatctcatcactggggtgattattttaaatttcttttagttaaaaatttgcatttaaatttcttaactgggaaatatttttttcacaaaaatgtttaactatcaaatgaaggattttatactttctggttgttactgtattttcctggttgtattcataaatgtggttgatctctataattttaacgatcagtctttcttcataggatatttgtttctatggaatttcctattaagatctgtaaatgcaaacagtttttctttcctttttttttttttttttttttttttgagacagagtctctctctgttacccaggctggagtgcagtggcacgatattggttcactacaacctccacctcttcggttcaagtgattctcatgcctcagcctcccaagtagctgggattataggcatgtgccaccatgcccagctagtttttgtatttttagtggagatggggtatcgccatgttggcgcggctggtcttgaactcctgacctcaggtgatccgcctgcctcagcttcccaaagtgttgggattacaggcgtgagccaccacgcccggccacaaacagtttttcaaaaacagtacagtatagtgagtaaaagcactagcttatgcaacaggttggttttgtgtgctgcagctaacctcaaagttgtaaggattaaattagataataaagtgcttttagtaacatgcctggcacagttcattgattcaaacattgaaaaaaaatttttttaattatacatagtagtgtgtacctttggaaaaattagaacttaacagataaggctaagtttgagccttccagtcctttccttctctgcatactcttcagaggtaactgggatcatgttctgggagcatgtcattccaagtctgtttctttgcttttataaacacatctgtttccatagaaatgctgtagtgtttgcagagggggcggggcgtggtatcatcctggatttgttattctgcgcttttttgcttgacctaccttggatggctctctagtcgttacagcttttaccttttaactattactcagtattcttactaaggtaagactatgctgatgatgtttatatttctctagtaaaaggctgggcatggtggctcacgcctgtaatcccagtgctttgagaatgtaatcccagcgctttgggaagctgaggtggttggatcacctgaggtcaggagttcgagactagcctggccaacatggtgaaaccccgtctctaccaaaaatataaaaattagccgggcgtggtggcgggtgcctgtaatcctagctactcagagggctgaggcaggagaatggcttgaacctaggaggcggaggttgcagtgagccgagatcaccccattgcacttcagcctgggcaaaaagagcgaaactccttctcaaaaataaataaataaataaaaatatttctctagtaagccatttttgatattttaatattctgctttttatattcttgttgttacattcttataaaggatacatttttaggccgggcttggtggctcacgcctgtaatcctagcagtttgggaggctgaggcgggtggatcacctgaagtcaggagttcaagaccagcctagacaacatggtgaaactccatctctactaaaaatacaaaaaatttgctgggcgtggtggtgcatgcgtgtaatcccagctactcggaaggccgaggcaggagaatagcatgaactgggcaggcagaggttgcagtgagccgagatcgtgctgatgcactccagcctgggccacagagctagactccatctcaaaaaaaaaaatatatatatatatatatttatatatatatatatatttatatttatatatatatatttatattttatatatatttttatatatatatttttcttagattcaaagtaaatcttgtgtattatttcttccagcacatcttttgcttcataacttgctgcatcatgtttatgattattattttaaaaagctgttacttctttgaaggaggagcctaaaggctgacagtatctcttctttagcttaataactagtagttctaatttggtattttatactcttagcacaccacacaaatgagtgatgaggaagaggatgatgatggctgtgaccttttcgctgactctgagaaggaggaggaagatattgaggacattgaagaaaatactagacctgtaaggaaggctgtagttgctatcacttggcagagttttagaaccaatgacttgtttttctttttattgtgacttactttgtacatcactcattttggcatatttgtcatttcatttacactttggaaaataatggcaagcatctcaaattgcctcacaagtaccactttcttgtccagatgttatgattttatgagtcagatcattcagaatatgtctagttctagagtttgaagaccatagtgctcctgtctctccatccattcacctttttcttattttcgtatttagatttttaagtattaaagtcaagtattaaaaagaataaggaaataaagggcatctccctttgaaggaacattttatgagtcctattccttgggtgagctgtatagggtacatatgtttaaattcatttaattaaactctgttttctcctcagttcaatttctttgctcttgtatacataatgttgttaggtgtccaaagtgaagtgtactagtttgttacaaaaaagcgattcttttgatttctcctgctgtagaaaagaagcagacctacatcgtttgcagatgagctggctgcccgcatcaagggggatgccgtgggtcgagtggacgaggagccgacaagtgagccccagccgcgttgatggggagtagggggggagtagtgcagggccctctgctggcttcaccaaaggcggatttctctttttattagtaattactacatatatttattagtaattgctacatataatttaaattgtagcgcttattccttttttggttaatgagctcctttagataactgaacactgtggacccacaagaaaaacgtacatgtacacatgtagataaccctttacatataatttcaggggattaatagaaactccagagaaccatgggcaacagcttaagaattcctggctgaatatttactcctatattttgaacacgtaagaatgtgctatatagcatattctagttataacagggtagaaagataacacaataattctttcaacaaatacaatcctgttatgcacatgagcctggtacgaaagcagaaggcttctgccttacaaagagactcttgagtgcccactgtgggcaaggccagggggttcagtgctctggtgcagctgagatgaaaggcagatgtcttgctcttagctgtgagttataaggatgacagacgtggaaagaaccaggatgtgtatactgagggaggacttagtactattaaaactgtgaactgttcttcaagccttaccctcaggagaagcaaaacctcggaagacactcaaagagaagaaggaaaggagaactccttcagacggtgggccttttccctcaattctgttattttaggagcctgttgactaaggaatgttgcttacataattcatgaagtactgctttacatgctgttttccctctgacaaatgggtctgtctccatttacttttctaaagcctctgggctgggcgcggtggctcacacctgtaatcccagcgctttgggaggctgaggcgggcggatcatgaggtcaggagtttaagaccagcctggccaacatagtgaaaccccatttctactaaaaatacaaaaaattagcttggcatggtggtgggtgcctgttgtcccagctacttgggaggctgaggcaggagaatcacttgaacccgggaggcagagattgcagtgagccttgatcgcgccactgcattccagcccaggtgatggtgcgagactccatcccaaaaacaaacagaagccttggaaggcatgttttggggtgctgggaggatatgtgggtgtggagtaaaaattcctgtagagatttgatttattagattttacagcaatcatttcttgtcttcctagaattcttagaagtatagaaacttaggaatctctagcatttgttttcaataaaggatacaccaggcctttttctgcaaacagccatgtccattacattagacttgtccctgtgtcagtttgcagatccctttgtttattctgcccttccttcccccagattggttggggaatgggtcttgaatgtggcgtctgacccgaatgcttgcttcagagtaaatctagatccagggtgctggcctagagaatgaatgctgtctgccgcagacatggacagacttgagagtggaggcccagagagtcttttgagggtgtcagtggactgtgccaggggtttagtgtgaaattcatcagactgcctcacactttgttaaatagtgtcagataaactccatgccagtttggagacacagcagatgccaacccgggaatttgagttctggccccatctttaatactccctgcaaaacattgctttctgtttgctagatgaagaggataacttattcacaccccccaagctgaccgacgaggacttctcgccatttggctctggaggtggcctgttcagtgggggcaaggggctatttgatgatgaggacgaggaggtgagtccatggcacccagcaacactccctgcagctagctgtgtcaggggtccacagggaagatataggctttgcttgtttagtgggggaaaaacagtttctcagttggaagttgcttctattttcatattttgggacattttgaactaagaatcacagagtgagaaatgccgtatccttctatgctttgttaggtgaggagaagatgtgcacgtgttaatgtgaataatttactaggtgattgtttcttgccttatctgttgtcttccacgtttgtttttaattcctggacaggcctaaattattttagggtctgatttttccatagttatcactttgcaactgattttctggcagagtagtaaatatgtagctttaaatcttgtaggttatttttccttaggaatcctcacatgcagctatgctttctcctggttttttgaattctttgtcatataccttatttcaaccagagtgacctcttcacggaagccccccaggatcggcaagctggagcctctgttaaggagggtaagctggggttgggcagctgcgtctccgtgtgcagagttccaaaactgtctttctcactaggagatggaacaaggttgttcccaagccttgtttctgtgttaagcaggaagctgttgtttttactgtggtcctgttgaaagtaattcatcttcactaattcatgtcttggaaaaaacagtaccatctgtaaacccataccacagtcttgcctctttgttaggagagaactcatagaaagtcaaacaagaaaggaccctagagcaatgttgaggatggttttcattgaatgaagtttaatttaaagaaacatttttaacattctgtatataagttggagaccagtaattccccaacccagtgtgcattaaaatcatctgtgcaggtttttttgtttttttgttttttgtttttgtatttttagtagagacagggtttcaccatgttggacggttggacaggctggtcttaaactcctatcctcaagtgatcacccgcctagacctggcaaaatgctaggaatacaggcatgagccactgcacctgtccccttggtgcagttttaaaaaaacacaaatataaatatgttttttaacctacaaatgttactccataggtttgtggtagttcttgggacttgggaattagtgattctaagtgccgagtctcccgggcacaggcatcagagctgggccttggaggccgctccttgtgcctgctgtgcgggctgctagcctggctctcctctgctttctgctgtccatgttttggcatcagtgacttgcttggtttccccctttgctcttatgtctttatttttttactgatgactcacatgtttttgcggttctttttcacccgttcattctcatccaactggaatgggtagaggtggaactgtttgggggagccccggtcatgctgtccctgcctctgctgtgctcatctcctcccttggtgtccccaagctgacccactgctgtggcttgatgacggtcagcatgctcttccattggagtcacagctcagattgtgttaatcccaaaaaaaaagtcctgacatcggtagagaagaaaatactaaagaattttaaaatgacttgttcaggaaaaagtggtttcaaaaggtctgatactagctgtgttttacattgcacgtatttcaggaagaaaatagcaaggaaagttatttcccttgtaaaatggttaccccttgctttctcattctagagtcttcatcatccaaacctggaaagaaaatcccagcaggagctgtttctgtatttttaggtaacataacttaggtttgttttctaaaaactacacaaatactgttttttgcatttcaaaattatcatcttctaaagtccggctggagatgaggaagtacctgggagcttcaaagggctttgagcatcttatagaaagagctcatttactgatattagctcttattctcctagagctcagtggccttggacttttttgtgtttgagctgacctggtgattctccgttgtgagatgttctgtagcagtaatggatggaggctattgggccctgttatgcattttgtggattaactgaaatggaaagtttttggtgggtgataatttttttctgtaaattcaaccggcccacactggctcacagctgtggctgtcttgtctctccacccacaggagacacggatgtgtttggtgctgcctccgttccatcaatgaaggagccacagaagcctgagcagcccactccaaggaaaagcccctatggtccccctcccactggcctctttgatgatgatgatggtgatgatgatgacgactttttctcggcaccccacagcaaaccttctaaaacaggtatgtgttcctgcctccgtttctaggacttcagccagaaaaagaacgttgcctaaaaagaacataagctcacctagttctgtatctcttacagtgccagaatcccttctccagcattcctgtcattgagttgttgtgtctgtacttacataggtgtggtgcctgggaggtctgttttatgacccaatcttttctgctctgtaagctaattactatgattattttccttatagagagctgaaatccttttctgtataatttttgcttgcaatttccagttctgacctttggtattgtaaagttttaatcatcctttcttccagccgaccttagtcaattacatgagcagcaggttgtgtgccggccatttatttcccagcttctcatttctctgccaaaaagctcaggtggccttggtctttcctcagatgatgttttcatccccttggccactttggcattctcctctcttttcctcttaaatgtaagtcctatgtcctgaagtcattcccataaatcatttgtttttaaatgtgcagatgaatcttccaggggcttttgtcaaaatgaagattccgattcagtaggtccagggtggggcctgagaatttacatttccagcaagcttcatggtctgtagatcacacttcgaatagcaagacttagatccattgactgctcttccagaaaagaaaggtagatccctagatccctaaggtgcacatgattttcagcaactttaaaaaataaaaaaggatggcataggaatggatggaactagaatgcatttagaagccggctgtctggactcactctcttccagtgttaggtgtagaaagtaaggatggaagccgaagtgtgagggaaaacgatagcctagttaatctagaaagagtgcaaacggatgcagaatgcacacaggtctcagtgaagatgacaatgcacacaggtctcggtgaagatgacagtgaatgaaggtagtagtgctttttgtagctccacagggctcttacttagtggatatctttgagaactgatttagaatccctagtaaattgatgctgctttctttgacaactcctagtctcttcagacattcatgagtcagtgacctcatttcagcaacacatgccctattcggtacagcagtgcttatggtgatgaaaggttggaaaccacccaaatacttatcagtagagtaagctatggcccttctattcaatggactattctgtgacagttaaaaagaaaggggtctacgcttgttgacttgggaagattttgtaggtacattgagtggaaaacacaaatggtaagacattgttcaaattatcttcttatttatagccttatttataaataactagtgttaattcattagtacatcctttgggggaattagaagcatgtatgctgaactgttcccaatgttcatcttgtttgagtagactggtggaattatgaggggatttcattatttgcttttatctgcttttgtacagtttgattttttttaaaacaggagccaagccttcatttctcagattccttagatgattgacttggtggccctcttaaatgatctttcttcctctagatctctcttcaccttgtaagccagtccaagctactctaagtacaggaaatggctgcttggataagcatgtcagccacgtggataaactatctgttctgtctttcaactgaactgctactacgcactttgaaaaattccaagggaagagtatagttccacttactatttctttataactaatcaagaaacaacataactttttatgtttattctttgggagggaagaattttttaatctgtgaattttgtgataggatgtttgacgttagtgtcattttatgccttggtattttttacaggcaaagtccaatccactgccgatatctttggtgacgaagaaggagatctgttcaaagaaaaagccgtagcatcgccagaagccactgtgagtcagacagatgaaaataaagcaagagcagaaaaaaaggtgagcaggagggaagacttaacgcaggagcattgatctgccgcattttaataattcatcctgaacccagagggaagtgctgttccctttcacgttcatattgaagaacttcaaacagaaagtggaaagaacattgcagtgaacacccaaataactgccacccagattgatcagttcttagggttttggcaaacactttatggatgtaaaccttgttacatatctatttttttcctgaactatttgcatgtaagttgtttgaactgtttgctgcatggaactgtttccatgtagtcattgtgacattctacccctaaatatttcattaagcctctcttgaaaagacttccatataagcgcaatgccattatcaacagctgtgagactaacagtaattctatagtagaatctaatatctagtctgtattagaattgctccagttgccccagaatgtctttgtaaaatcaccccaacaaatagaatacagatttaaaattatctcgcatatagttcatactgcaatttcctctcttgtccccaaaatgccatttacagcagtgatccccaacctttttggcattagggacataaggagagtgcaacctgcaatctagatccctcgcatgcacagttcacaatagcgtttgccttcctatgagaatctgatgctgccactgatctgacaggaggaggagcttaggcagtaatgcttgctgctcacctcacctcctgctgtgcggcccggcttctaacaggccatggactggtctgcagcccagggttggggacccctgctttatagtatttttttatgttttgattttttttttgttctaagaaactcaggattcggacagtgtgtctgcattgcatttggttgtcatgtctctttggtctccttaatctagagcaacacctcccacatctttttttttttaatatccagccacttgtattgtagaatgtgtctcgtgaatttgcttgattattttcctatgaatagattcagggtgagaagttttggcaagaatacaagcaggcagggttgtgcacttccagttggatcacctcccaagacacatcaggtccactgtctgcctcattcagacacgtttgtcacttggttgttagggtgcccaccacactgcttcattggaaaggtaccctgttctcttttgccgttgctaagttgatctctaaagcgatagttgaacacagtgtgaatacctgttctctcccagccttttactcagtgttttgaaaatccactgatgatcttttcttgactcagttaatctgttagcgggcacaaaccactatttttttaattctatattttttattagttggcattcttctgaatgaagttctttctctccctctccttccccgatttttagtattgctttgggatcatgtattcattcttcagtgtagatgataatccattaccatcattcttcttctttttttttttttttgtgagacagggtcttgctctgttgcccagactggagtgtagtggtacaatcacagctcactgcagcctcaacctcctgggttcaagcgattctccagcctcagcctaccaagtagctgggactatatgcgtgcgccaccatgcccggctaattttttgtggagacgggttttgcccatgttggccaaaccatcattctttttgatgctcagattgacctgcatttggccagtgtgtgtgtccccagcagtctttaagcccttctgactgcttgacctttcactgctgtcctgtacagctggtccctcctctttctacagttttgtctctttgtgtcgtgtcctggctgtgaagccctgactttctcctgccgaccacctaaggcccagcattcagaacctgtcaggcccgtcaggcagcctgtctttccatgctgtctctcattgcatatgtcccatctgtgcacccattgacccagactgtgtgtcctgctccctgatacaccagatgtgtcctctgtttgtcttgctgttctcttaacagccccctcagcttgctgcctatcacagcagagactccgtgcgttttctcgattgattgagtaaaccctcttttctgggtatcttacgtgttaatgcttaatttttctttttctttttttcttccccaccaccccccccacccccgacaaaggttaccttatcttccagcaaaaatctcaagccctcatcagaaacaaagactcaaaaaggcttattttcagatgaggaggactctgaggtatggaattctattgcttagttgtgggtattagtctatggatatgacctagaaactatttttgaatcaggtttttctcaatagagttataagactttttgttaagtactccagttctttaaaaattatctctagaggccaggagtagtggttcatgcctgtaatcccagcactttggtaggccaaggcaggcggatacctgaggtcaggagttggagaccaggctggccaacatgatgaaacccagtctctattaaaaagacaaaaattagccgggtatggtggtgcgagcctgtaatcccagttactcagaaggctgagataggagattcacttgaacccgggaggcagaagttgcaatgaaccgagatcacaccattgcactccagtctgggcgacagagcgagacttcatctcaaaataaataaatgaataaaaaataatctcttgagagcacaggggctttagaaagcaatatgtttacaatacttttcactttgggttggactgtatttacatttcctgggatgaaaatcctctctctttaggatgctcagattttaaactgttcatgggctcatgatgtgatgaggagcttgcaccagagtggaggtcaccatgctacttcctttattcacattctcactaactagaccatgccttaacgctgtagcagatgggttctggcatagccatctgtcttgtcgagactgagaccactaacagcctctgggaccctggttcataggttgctttggtccctccaggcaccttagaaccacctctcagaatttcactgcttttcctgagtctctcaggcctaggtcgtcttagatccaattttaagttggccttttaggagatcatagaactgtatgagattgtaatgggaagtaataagccccttttacagaaaaatatgtggacatggcagaaacttacatgtatttcaagaaactgtgggctctagattaggctgtcatggttgggctttgcactcacagcaaggatgaacatggaaccctttggaagtagagtgattgcccttgatgtaaagaatacctttgaggctatcactgaaggcgagtgtacaaaacgtaggaattaaccaaagtccagttaagtcacaaccctgacccctgagaaacagcatgatggggcctccaccgtcttatgctcatggatcccatgtgtcacccacacctgcacctcagggtctttgcaccggcccctgccactctgaggaatgctgttcccagaatccagcttgcttcctcactcttcgatttctctgtgaggcctccctgatgaaatacacacagcaggaagcctgctagcacataccacgctgtgctcctggtcctctttcctatttcactgtttaccacagcacgtgttgccagggacagtgtatatttacttattcattgtctctacttcccactaaagtacgtgccatgagggcaggactttgtattccctatttgtatccctaacaccccgtccttaataccagtgcttggcatgttgtaagccatccagtaattgttgattagacaagaaaaccaaatgtgaacaatttcagtgacttacgagatgttctggttatttgttgctatgaaacaagtaactcaaaaacctagtggttcataacacccatagttttgttgtctcacagttcgagaggttgactgggcttagctaggccattgtcactgagggtctcttgtgtctgaaggtggctgggctgagggtcagctcactcatatgtctggtacctgggcactggggcccctgggacatctctcactagccctgtgtggctcccagcatgtagtcagggaagccggtcctcttacatgctggctcagggctgtaggggagagtcctcagagagagcccgatggaggccatgttgccttctttgttccagccttggaagtcaacggtgttccttttgcttcatttgttggccaagatggtcacaatggcccatccaggtttatggggagaggccataggctccccttcttgatggtgggagtgtaaatgtactctcagacttgtgtgaaaaccctaccaaaggctttgccccatgtgtgtcatcatagagcgaatgtttttattggatattgttcagattctaaggcaaggagaggtaaaactaaggcagtctaagtaagagttaaagctttggacccgaaggaatgcgtcctgactcctttctctatatctcaagtgtgaggctgaagcttgccctgtggtcattttgggggaacatatttgaggtaatggaagtgtcttttcttgcagtaccaagaaaggtatcagttaagggtccgaaactgtgatgtcgacatttgtttttgttctttgctttggtttactttcattttcttagaacagcagaaccctttctcttgccattgtgtaacatgcaggagggacacgggatgcctggaattccccttgtggcctcttctatctaaataaacccatgggactccggggagcacaggggaaaaacactgtgtggaggagatctcacttagtgaactcattaggtctatatttaggagtagacagcgaccccataattaaaaaaaaaaaaaactgtccaaagaggtcttagaaatatcttcttgtcctatttaattgttcggctcttgtgtattgaagtttatcttcccaagggaatagatgtcccattttatgtttctacttcatgtaggtcaacttgcaggtctttctttgcaggataagctgatgttttataacattttgaaaatttcttgatttttatattttttagctattttgagatgaaattatactctttttgcctaggctggagtgcaatggtgggatcttggctcactgcaacctctgccttccgggttcaagcaattctcctgccacagcctcctgagtagctgagataacaggcacccaccaccacacctggctaatctggtatttttacaaaattaatataggctggtcttgaactcctgacctcaggtgatctgcctgccccagcctcccaaaatgctgggattatagacatgagccacagcaccgagctgaaagtttctttagaatctatcaggtcttatcctggtttgcaatgtcatatacctatagttaagctaagtagactagcaaacatttaaaaataaagtttaatttgtatttatttaaaagaaataagtcggccgggtgtggtggctcaagcctgtaatcccagcacttgtggaagccgaggcgggcggatcacaaggtcaggagatcgagaccatcctggctaacatggtgaaaccccgtctctactaaaaatacaaaaaaattagccaggcgtggtggcaggcgcctgtagtctcagctactcaggaggcagaggcaggagaatggcgtgaatccgggaggcggagctttcagtgagccgagattgcaccactgcactgcagcctgggcaacagagcgagactccgcctcaaaaaaaagaaaaagaagtaagtcataatcttaggagagaagggtgttactaaataaaatagttgtagctccattaatttgggaatctagcccctgtttctttattgaccctgtctaatctttgattctttagacggtaatgggaagccatgcttatatatttatttttttagcatggtgtaggaaattgattcaaaaacttattcctgccttctgtcattcaggtgggaatacagaagcccctgggctctgcgaggccaccagatcctgtagctctcctcctccttagtgccactgcacacaccctgcacagaccctgaggcctatccctttaaggactctgtctgagccaccttccctctcaggaaagaagcctagacacatggcagctgtcatgtctgagtcacttgtgttttatactgacctgatattttaaaaactgatattcctgttaaccagcaactttaatttcaatccaacaggatttgttttcttctcaaagtgcgagtaagttaaaaggtgcatctctgctgcctggcaagctccccacgtcggtttccctgtttgatgatgaagatgaagaggtaaacattgttattgtaacactagataatttagattaggagaaaacggttgttgatgtaactttctacccagaggctcatatactagcaaaaggtggtagggaagcagtcaggccacctgaagtttatataacaaaaatatttctgtttttatttcagtgacttcttccttatattttcctagctgtgcaatggagaagacattagattcttgatgcagttctttttttttttttttttccgagttggagactttctctgtcacccaggctggagtgcagtgatgcgatcttggctcactgcaaccgggttcaggtgattctcctgcctcgacctcccaagtagctgggactacaggcgtgcaccaccactcccggctaatttttgtattgttagtagagacagggtttcaccatgttggccaggctagtttcgaactcctgatctcaggtgatccgcctgcctcggcctccctaagtgctaggattacaggtgtgagccaccatgcctggcttcttgacacagttcttatggagtgaaatctacaggttttatttttagaaatctgcctttgagaaatacaattgaccctttaacagtgtggaggttattttgacttccacattgcagtgaaaaatccatatataacttcttacttcccaaaaacttatctactgatagcttactgttaaccagaagcctcatggataacataaacaggtgattaacatataaatagtataatatctatttatatatttttgtattcctgacatatccagcttttccttattttttttatgatatttctaggccacatggtttgtctgcaagatttttcaaattgttgcaaatgtccaaaaaaattttcaacatattactgagaaaacatttgtgtagaagtggacctgtgcagctcaaacctgtgtcattcagggtcagctgtactttagtctagaggatggatcaacatatacccaatgacctacaagaatgttttggatcaagtggagatacaaaggagaaggcagccatgtcctgaccattgtctttctttcccatcctggctggagagagcacagtggggaagagaaataagagagaagacaacccaaaccttaactctcatgcagtactgggcggtggtgagctcaaaggctttgccatcagacccctgggttcatatcccagctccaccacttgcaaaccagggacctggggcaagtaacttaaccttccttaagctcatgtggcttaacagtgagtagggtcactgtggcagctgtaactactagtgtgaagctcttgcagagtgccggcacataataagtgcatagtgaatgtgagctctgtcattagcatccccaatggacaccagctcattattctcctggcctgtcctacattaccgcactctccttaaaggagacttcatccaggaagacactcccttcatccatcttcacattccagggctgttcacctgagtttgtccatcctaactcagattcaggccctctgatgcttttgttccccttatctgaataaaagcaccttaataaatataacttttggggagtgcttgaccacagaagaatttacaaatgccattaaacttagtacaccagcaattttatttagtaagctatttctccactttgtataatctctttgaaactaatgagaaacacaagtcatgccttccctccatcccaggtgtatgtctttctgacctgtaaaggagtggagacagacccccagttctctcctttcagccattgttctggtttctcattcgtggagacaacagtgtgagtttctggctgctgcgggggctcccgtgcccattgcaggctgtaaccccctgaaatgagcagagaggcacttgcccacagggtgactggatggggctcagtttctccttgtacttcatgatctcatttgcatgttgttctcctgcttatatgcagctgttctgccttcgagttctatggtaatctctttcccttctatgggtgcagtgagaaaaggctgtagtttgggatttactagcattttgcggtttttccccgccagagttgttatttgtatacctgactggagacttacttcctaacagtttgatataggaggacatcctatgttttctgattataaagttgtcttacctttctgccatttgcttttctaggataatctttttgggggtacagctgctaagaagcagacattgtgtctacaagctcagagagaagagaaagcaaaagcctccgagctctccaaaaagaaagcatctgccctgttgttcagcagtgatgaggaggtgagctgaggtttctgtaaagaagaggggattatttcatgggatttaagagttaaagccatcccaagtctttttctacctgttttatatctcgtgatgttcagtcaccaaaggcgatgttcacaagattgtcttttctgacggaagacatttaatgtaatatattaatttaaagatgaatctcttcaaaatggttaggaataagtatgactcccacacaatagtgtatgctccttcaaatgagttaggccggctaggggggaaatgatttctcagccatcgctagttcatggtcgagtcccttagaacaaatgacagattaaccagagaaaagtgtgcaagtttacgtaagataagttttaccagacacaggagccttcagaaagaaaaactcaagagaaacaggaaatcctgtgtcaattttatgcagtctgatgaagaagcggacagttttgagggagcacgattagatgaaaggggtgtgacctgatgggaataagctggggggagctcagcaaggcctgtgtggtcagatcattctctgcatctttaccaataaggaggctcctttcctctgggaatagggaggactggaatgaaggttttatgacctactccagagagggttagaggattcttctatgtcctgcttcagaggagaagggccagggaaaggtcagagagacctttctgcttctgttttctcaaatgccaaggtgtcatattttgaggtagcatgtcccgtataccccaatggccatatatactagtatcttgttaaatgactactgtgtttcattaatttagaactatagttaggaggagttacctattgaggttaaactcctttttgagggagtcttaacaatatttctgtttgtgatctggatagatactaccaaatcagttagtttagttgctaactcaatcagatttagtagcagggaatcagatttagctgtgcagaaaaagactttaaatatgatgatataaaaaatcctgagtattaaacatcttcctgtgttataataattcctctttttttttaacattgtaggcaagttaatagggggtgaagtggatatataagtcatagatatgttcatgttcttactgaaagcaatttaaaaattccgaagcagattgcaaaaaaaaatgtattaaaagcttatgaggccgggcgtggtggctcacgtctgtaatcccagcactttgagagtctgaggcaggcagatcacttgaggttgggagttcgagaccagcctaaccaacatggagaaaccttgtctctattaaaaatacaaaaaaattagcaggttgtggtggcgcatgcctgtaatcccaactactcaggaggctgaggcaggagaatcacttgaacccaggagatggaggttgtcgtgaaccgagatcacgccattgcactccagcctgggcaacgagcgaaactccgtctcaaaaaaaagcttatgcaacacacatgtgaacaagacacaatgaaaaactgctagtaatccttttactacaaaagtctgagtctggcctttagaaagcgtttaaggaattcccacccagctgtgctcatgccttcacatcaaggaactcccaagcatatataatttgtgttttctactcaaatgtatgaatttatgatagattatccagtttttttcttttaaacattgtcagtgattgttccccctgtagcaacagccagacatcagtgtagttgctcctactagagtattatagtggttcagggaaaataaaaacattacctaaagcttggagcaaaaagacatgcagaagaaagacagccaaggttctagaacaggggcgtccagtcttttggcttccctggcccacactggaagaagaagaattgtcttgggtcacacataaagtgcgctaatactaacaatagctgacgaactaaaaaaataaaaaggttcgtgcataaatcccataatgttttaagaaagtttacagatttgtggtgggccgcattcaaagccatactgggctgtgtgtggcccatgggccacaggttggacaagcttgtcctagaacaaaggctgtcaacttcggctgctcattgggatccatggggaacttaaaagagtgctgacaggccgggcacagtggctcacgcctgtaatcccagcactctgggaggcgaaggaggtgggcagatcacctgagattaggagtttgagaccagcctggccaacatggcgaaactctgtctctactaaaaaatacaaaaattatctgggtgttgtggtgcttgcctgtaatcccagctactcaggaggctgaggcaagagaatcacttgaacccgggaggcagaggttgcagtgagccgagaccgcgccactgcactccagcccgggccacagagcaagactctgtctcgaaaaaggaaaaaaaaaaaaaaaaaaaaaaaagaagacctgacgagtgctgacagtagatcccagctccagagattctgaattaatctggttggggtacagcctcgtcattggagttttgtgatactctctagtggatttcagcgtttagtcactgctaaacattgaggagcacttctcaaaccttcatgtttaggaaatcacccaggcaccctgtgaaatgcaggttctgattcagaaaataggcgcggggcctgaaattctgcataatctgctgctggcttgtggactccagtttgatttgcaagactctagactccagagatagagcacttatgcaagtgcttgggagttctttgatttgaaggggtgtgagcatagtcgagtagaatttccttaaatgctttctaaaggccacattcagacttgtggtaaaaggattactagcagtttttcattgtatcttgttcacatgtgtgctgcatgagtttttacacttttttttcaatctgctttaggatttttagaattaaaatattcttctctggagttggaagttcttgagttcttggtatttttacatttggcttccttcttatagcctctgtaattaatgttgattccctgaaatagacaagtcgcttgtcgtaatacagtgcagaaccacagtgggaagagacatcgtggcaggtgttggaggaggaaatcatgagaagctctgtgaggtcagagagcccagctgtctagatttgagttcaaagaaaagtcttaagcatgagctttcttcaagactgatgcactaagtttaatacttagtttaaatacaacttagtttaacaaatataagtttgattttactccccatgttttataatctaaattgccattggacttttttttctttttttgagacagagtctcgctctgtcccccaggctggagtgcagtggcacgatctccgttcactgcaagctctgcctcctgggttcactccattctcctgcctcagcctcccgagtagctgggactacaggctcccgccaccacgcccggctaattttcttgtatttttagtagagacggggtttcaccatgttagcaaggatggtcttgatctgctgatctcgtgattcacccgcctcagcctcccaaagtgctgggattataggtatgagccactgcgcctggcctggagttttaatatatattttatgttttaaggaccagtggaatattcctgcttcacagacccacttagcatctgacagcaggtctaaaggagaacccagggattctgggaccctccagagccaggaggccaaggctgtgaaaaagaccagtctctttgaggaagacgaagaagatgatctttttgccattgccaaggacaggtgagatagtcattggaaggagtccctcactccgttaccgtggtaacaagaaaaggaatctgatgcacaatctagttcatcgggtgattgctaatcatggatcacatagtgattgtgccagtgagaatgtctttgcttttcaatggcaccatcttttccctcagtacccggaaatgtttgtctttgtggatccttatctgatttcttccccaatcattattttttaaccatattctttttctttgtttgtcagggatttgagtatcttttgtttgtgatttttctctgggctactctaaagtatgtcaggtttggtcaggattacttaaaagttactttaggccaggcacgttggctcatgcctgtaatcccagcactttgggaggccgaggtgggcggatcacgatgtcaggagttcaagaccagcctggccaatatggtgaaaccctgtctctactaaaaaaatataaaaattagccgggtgtggtggcacgcgcctgtagtcccagctacttgggaggctgaggcagaagaatggcttgaacttgggaggtggaggttgcagtgagctgagatggcaccactgcactccagcctgggcaacggagcaagactccatctcaaaaaaaaaaaaaaaaaaaaaaaaagttatttgaatagaaatctgctcagcatttaacacatcctgttaggaggaagttccctgtagagctgtgcagtatcactccaggggctgataacccatagccaacctaggtgcctctccccattaatgctggaactgaagctgctaggatattcagagtgagcgtgggctgtggttggtataacatgctgccagattagcttatgggttcagaattacttccctgcaaatactttttttccttttgaaagcctgacatgattactttgaaattcacctgaatgttattagcagaaagaagtaactgattggacatgtaaatcctatgctttggtgtggttaagcgtcatttgatagattcagaagtacctcaggtttctgtctccaaatactcgaatcttgtcaagcatcaccatttctgcattaggcctctgtaacttgacactcggatgcatctttggtctctgatttagaatataggctctggaaacttgatattaaattctgattctgccagttcctgtctgaataaccttgggcaagttacctaacttccctgtgcctcaatttcctcatttgttaaacaaaaataaaaacagcatttctctcatcggtttgttgggatgatgaggtggaatctaaatgtgaaatgctgagcacaagagctggcacattctgagccctcaggtattgccagttagcatcgtgactgcagggaaatagtacattcctttatttttgttgctctctcctgggacattcttcttcctgtgttgcctggccaccttctttcaaaactaagtgtaagtcttgtttcataagaagccttcccggctgggcgcagtggctcacgcctgtaatcccagcacttggggaggccgaggcaggcagatcacgaggtcaggagttgaagaacagcctgaccaacatggtgaaaccccgtctctactaaaaatacaaaaatgagctgggcgtcatgtcacgcacctgtaatcccagctactcgggaggctgaggcaggagaattgcttgaacctgggaggcagaggttacagtgagccaagatctcaccactgcactccagcctgggcaacagagagagactccatctcaaaaaaaaaggcctttcctaactttaaacagacgagaaagagaagaagtagggagtcgagggcggacatggctccaccttcataccccaacaccctcagctgagcattttctgcactgtatccaggttagcttattcccatgagtgtccactacccccaccccacacaaggtcataaatctggcagtctgaaccccatcttgtttgtgggtcctggttccagccacacaccatacctggctttcaggaatgctttctctgctccagatacatcctacctcctattgttcccgaagttgtctgtcaagttttgtgtatggaaagtaattcataccttcatcagatctcaaaagaagctttacacacacaagaagaagttgaggtgaggatgtgtaggaattggaaccctcatacactgctggtgggaacgtaaaatggtgtagtcactttggaaagtagtttggcatttcctcaaaatgttaaacatagagtcaccatatgacataatagtttcattcctatgtatatacataagagaaatgaaattagttgttcatataaaaacttgtacatgagtgtttattgcagccttagtcataacagccgaaagtgtaaacaacccaaatgtccatcaactgatgactggataaacaaaatgtataaccatacgatggactgttcttcagcaataaaaaagaataaagtagcgatgcatcctagaacatgaatgaacctagaaaattttatgttacttgaaagaagctggtcacagaaaaccacatattgtattgttccatttatatgaaatgtatagataaaccacagagacagaaagtagattagtggttgccagggcctgtggggcagggggaatggagagtgatggctcataggcatggcggttctttttggggtcatgataatgttgtgcacttaggttgtagtgatattgcacaactcgatgagtatattaaagaaaacattgaagtatgcactttaaaagagtgaatctggattaagaaaaccattgaagtacgcactttaaaagagtgaatctggccaggtgcaacggctcatgcctgtaatcctaactgattgggaggccaagtggaaggatctcttgaggccaggtgtttgagaccagcctgagcaacatagagcgacctcacctctccaaaaaagtaaaaaaattagccaggcatggtgacgtgtgcctgtagttgtagctacttgagaggctacttgagttcaggaatttgaggctgcagtgggatatgattgtgccattgctctccagcctgggcagtagagtgagaccctgtcttaaaaagtaaaataaatattaaaaataaagtaaatacaaggtgaattttatggaatgtaaattatgtctcgataacgctactaaaaaaaagaaatagaagccaggcacagggtcatttcccagtgctgatcctggccctgtgatctctcttggcaaccgtcctcatgacaattctggaaataggcctgtccgctttgattctttttgtgctataggaagtgggagagaatgttctgcttgggaaggctcaggcatcgtgtgccttgcagcggtaacagctgatgaacctgcactggatagtaacaggaaaggggcaacctgaggcaggagggacagaggctggtgatttgttggagtcagatttcatctatttcaaaggtctttcctgtttgctttcaactgtgtaaggtcaactaatggcttgggtgtttgggtggtaggtggattcctgtaggtgcagtctagaagaaatattgttgttatggtttttgtttttttcatcacacttttccttaatttgaccttttgtttgtttgtgtagccaaaagaagacccagagagtgtcactcctctttgaagacgatgttgatagccgaggctctctgtttggctctcctcccacatctgttcctcctgcaacaaaggtattcttcatctcttagtcccaggaaatgtccttgagtttatgctgcatcagtagtggtacttccccgaatcagctcttcatacctaaccttggaggctgagtcttatggaagaccttatttgcctggtttcagaaagagatcttctgattaatagtattctacagaagaagcacacgtgcaaagccatcattcagtgtcaggtgtaggaacaaggaactgggtctcagaagaggcttgggccccattggcatggaattctgctaacattagactaggccagttaaggcaaaatcattccttttatgagtgtgtgtcgagtactaacactggtcctggtttatattagccagtcagtaaaaaggaaggaaattctcacatgtgctacaaaatgcatgaaccttgaggccgttatactccatcagtggagaaatggtcacacaggtcctagtacagttagactgtggaatactatacagtggtaaaaaaaacccagggtggagcttattgggatgaaaaacatactgcaggccaaaaaaaaaaaaaaagcgtaaacacgtaaacatggtgtaatttaaactttacaaaacaagaaatacacatgaatgcctggaaaccggcctgaaagcatcgatagcacattgttaccagtgattatgtccagggaaaggtatggaatggggaacttcatactctcaatgcctttttaaagcctttttaaggaaggcatttgtgcattactgtggaattagaaataaactccaaacaaaaaatatctaggagatacggaagaagacccttcctgttaaatggagttgctcagcttataccagaagctctcagccctgggccagcatgctgcccaccctgggccccaggctccctgctgctgcttctacggggctcctgagcctttccttgggtgctctgtacttacatctccccctttaaggacatccagtggttgtacaattaaaggagtcaggagatctgattggtttttctttgtaaattataaataaactactctggaggataactgagcaataaattaatgaattttggagcctctggagctgtaaaacttctttcaacctatggtaattatgattgttaaataaaacaaaaggtcaagacacacaacttaagtagctgaatagcctacacgtttttgattatttgtgaaatataatcatctttagacaatagtaaataaaagatatttcttgtttacagatatttcagtgtaagttaattgtgacttggttgtaagcctatgttgaccaaaaggttaaaccacaggcaggagaacttaaagaaatgtaatgtgagttttgttttgagccaagcttgagaactactagcccagtaaagagactccacacaaactgagaatgcgtcccagagtgggccacacgagacacagcatttatacatttctgttatatagaaaatgggaaaagggggcagtgaagcaacggtgactttcttaattcagattggtgctcagtgacattgaatataagataaagtaaatatgtggttaatgtattttcctcattagccttttaccctaatgagtacataggggtcgcagttgcagggtcaggagagggatggttgattttgtgctgcctttgtgcttcatccaataggcaggttgtaatcggtgcctgtcagtgtgatatttgacagactctggccttgcaggtgaggttcagctttcgttcataggcccggtttctattacccatatggccaagatgcagccattttagacaatttttttttcttcagactttccttattttctgacacctatcaagaaagtaaatttgaccaggcgtggtggctcacgcctgtaatcccaacactttgggaggctgaggtgggtggatcacctgaggtcaggagtttaggaccagcctggccaacatggtggaaccccatctctattaaaaatacaaaaattagccaggcatggtggtgcacgcctgtgatcccagctactagggaggctggggcaggagaatcacttgaacctgagagatggattttgcagtgagctgaggttgtgtcagtgcactccagcctgggcaacagagtgagactccatctcaaaaaaaaaaaaaaagaaagaaaaaaacaggaagtaaacttcatgacaaggatgagcttgtcttcaagaagattaaaactggtactttgggtagcattttctgtggtttaaggaccttagttatatatgaaggaagaatatgatttgccatacttaagtctctttttgtctcccctatcaactatttgcattgaatttttttttttttttttttttttgagacggagtcttgctctttcgtccaggctggagtgcagtggcgcatctcggctcactgcaagctccgcctcccgggttcacgccattctgcctcagcctccctagtagctgggactacaggcacccaccaccatgcccgactaattttttgtatttctttagtagagacggggtttcactttgttagccaggatggtctcgatctcctgatctcatgatccgcccaccttggcctcccaaagtgcttggattacaggtgtgagccaccgtgcccggcctgcactgaatttttatgtagttttcagtgagtccaggatgttccacaaaagccttttcctttgattacttcagtgttgccttatctcttctgaaattctttatgccttccagtgttcttttatgttaagttcaatggttttgcactttacttatctcttcctaactaaaaatccccttgctctcttctttcttcattcatcacattttaaaatcatgattagcaatgtccttccttagtttcccaaatctgccttcctaacttgatttaggcattgcctcaaagcacacttcctcgtgtcatatggtatgatttgtatctgtactatactataatagagctttagttttttctcaagcacctgttgataagtcacttgctgcaaaaatgccatgaattccaggaaagtcacaaacctcagtttcctagtccccaaatccctgcctccctgataaggaagagatgagaaatgggctgaagtgcttgcagacttgtattgaacactgagttggtataaaacactgggactgtccatgaaaatatagtgtatagtcctttcagatgaacagacaaacagatgtgtgctagctgttatataagttaggaagaaagtcaaggaagggtcaagtagagagataaatattatgcttattcaacaaagcaactgacacttaactgaagaggacagagaccgtgggtgacatctgcgtgggggccctgcttgaaggatggggaggatttgcacctacagacatcgagggcagtgtggcatggaagtttgaaagtttgcagtgaccttaaggaacagcagggaaaggaggagatgcttatgagtagagggatagaatggggtatctgctgagtgtcatttgcttcatgcaaggagtgctggtttgggttgggagaggacctgatccagcaggtgttttgttttagcaagacaacgctggataatgtcttctagttgaaatataagaggagtgaggcagagagagagactcataatcgtctggtggcagagataaggatctgagggagggaggcatgggggttgacagacacaagtagacagatacaggtgatatggtggcgtgaagtgtcctgtccacaagtcccgggtggtggtgtttgttgcttctcccttttggtgctaccttcactatcctgtcctctcttccttgatcacatttagctgaagccctaagaggatggtttgggcttgttctgtatatggccatgctggtcagacacacttttttattgttgtggatgtcatgtactcttcttttggtagaaaaaagagactgtctctgaggcaccacctttgctgttcagcgatgaagaagagaaggaggcacaacttggagtgaagtctgtggataagaaggttgagagtgccaaggagtcattaaaatttgggagaactgatgtggctgagtcagaaaaggtggacttttttctcttgtatacttgaatgcatttgtctctcgtatgttgtttcaaacacacccaaccccttaagttttttgaccacagaaaataaatggcccatttgtagacagatttgaaaacatagacaagcaggctgtgtccccacagtgcaggaagcctctgcagggcctttcctcccggcccttctccaagacatgtgcgcactgtggtgtgcctgctcctgtctctgtggttactgtcacgtcatggcatctttgctttctaacttgttctcttctgtgcagtgttcctgttacccttggtcctcctttggtccccaactgcacttgaatttaaatgtcagttttaaggagattttagtttagcatccttttacttttagatgatattggcaaggattacagagtagagtgaaatttctactctttctaaaacactagctttcaagtcctggacggtctgccgtctcttgcaggaggcctgtgggtagttctgctggccaaacctgggcatccagctttgtggttgccttcagtctctatatgcctcttttctttctctaacttttcttatacgctgtgtgtccagctgcttaggtctaagatctcccagggcctgtgtgaagagcgttgcatttgcatttgctgctgaggctccttggagctacagtgatacaagcatttcatttgtacctgtgttcctgtgtgaaattctcttcctagtggctgtgtgtggaccccagtcctatcccagtcctggtccacacttgactctgactggttgctgtactgccctctccctgagtgtaagccccttgcggactaggcccagtttgttttgctcaccatcatatctgtagtactggcatattaccttgcacacagtaggcactatgttataaactttgtatttctttaaaaaagcatttttttaatagtttgagtactctgaaatcgggatgtacctcataatcaatggtatcttacctgaaatgtgccatttgttgaatgaataaatactgcattttagaattatttcagagattcttcttcaattgcctatacagtgtaagccttttacaatttgagggtctgattttcctgattagatttcccccttggggcttatgtattagttaaatgctacgaattcatggtccactcccaatgattggcacttgtattggttatctttgacacttagaagttcttcctagttcatgagcaaccagtgtgcatcaggattatagccgtcctatcacttgataggagagagggacccatggtcttaatgcttggaaaagttatctttggctacggatgattgtacaagactgtctcttggagcagccaatcaagaattgacctcagtgttttgttacttgggcacagatgtgattcactgtgccctgagtcatgcaaatgtggcagttactgaattaacgagaagcttggcaggctccatgataggatttgtatttccaggtgttacttattttttccccctattattttcattttcaggaaggacttttgactagatctgctcaggaaacagtcaagcattctgatttattttcttcatcatccccatgggacaaaggaaccaagcctagaaccaaaactgttcttagcttgtttgatgaggaagaggataaaatggaagatcaaaacattatccaggctccacagaaagaagtaggaaaggtaagcaaaaagcaatagtggttcaagtctctggatgagataaaagactctcatctcatggttgtcattctgtcatgtgagtttctgaaggaatcttaaccttcaatgtagtgtgttaatgattctgggcagtcatttagatatttgggaatcttaatcaggaactcttacctcaagtagcagtgttaggataggggattagaatttcaccccccctcttctgggatttacagaccttgttgttccttctagcaaaactttgccccttggccagttgtgggatgtaaacagcaggaaagggaagttaggctggagttgtacagttaagtatttctaacattcagtttaagaaaaagtgttgtagatgaacctttcatactgatcaggtgtcagcaaactatttctataaaggaccatataatgactattctagcttttgcagcctatttgggctctgtcataactgcctagctctgccattggcagcatgaaaacagccctaggaaacatgaagatggatgggcatgactgtgttccagtaagttttattaataaaaataggtgatggtcagctgggcatggtggctcacacctgtaatcccagcactttaggaggccaaggtgggtggatcacaaggtcaagagatcgagaccatcctggccaacataatgaaaccctgtttctactaaaaatacaaaaaatagcttggcgtgatgacgcttgcctgtaatcccagctacttgggaggctgaggcaggagaattgcttgaaccaggaagtcagaggttgtagtgagccgagatcgcaccactgcactccagtgtggcaacagaacgagactccatctcaaaaaaaaaaaaaaaaaaaaatagatgatggtcattctgtgaggttagtatgaccctgatattaaaactagacagtgacatcaccagaaagctagatatcctttatgaatgtagaggccaaaatcctcaacaaaaatactactaaacccaattcagcaaaatataaaaaggattgcacattatgagaagtgagatttacccctggaatgcaaggttggttcaacatctaaaattagttgatataatgcactgtatcaataaaatacagaattaaaaggcgcatgatcatctcaacagatgcagaaaaagcttttaataaaatccaaaccttttcatggtaaagcactcaattaggcataggaggaagcttaatgaacttgataaaggacatctatgaaatccctcagctgacatcatacttaatggtgaaagactgcatgcttttcaaccctaacatcatgaacaacacaacaatgtccactcttggtaattctaatcaaccttgtactggggattctaagcaggccatgtaggtgagaaaatgaaataaaaggcattcagattggaaaggaaaaagtgaaatgaagcaatctgtatttgcagatggcatgatcttttatatagaaagtcttaaggaatctgcaaaaaacatccattggaaataattaaagtcattaagattgaaggatgtaagatcaatatgtgaaaaccaattgtagttctgtaagctagtaatgaacatttactaacttacaaaagttactactagtaactttctttttttttttttttgcaatggagtttcactcttgtcccccaggctggattgaaatgacacaatcttggctcactgcaacctttgcctcctgggttcaagcgattctcctgcctcagcctcctgagtagctgggattataggcacccaccaccatgcccagctaatttttgtatttttagtagagacagggtttcaccgtgttggccacgctgaccttgaactcttgacctcaggtgatccacctgccttagcctcccgaagtgctgggattacaggcatgagccactgcacccaacctactagtagtaactttcataagcaattaccagcttatgaatgaaattaagaaatcagtttcttttatagtaataccaagaagggtaaaatacttaggagtaaatttagcaaaagaagtacaagacttgtaaactaaaatctacaaaacattgaaagaaattaaagacctaaaattgatggaaagacatctcgtgtttatggaccagaaaccttaatattggtaaggtggcaatacttccttcccaaattgatttattgtaatctctatcaaaattccagcttgctttttgcagaaatggacaagctgatcctaaaatttttatggaactgtaagagaccaagaatagccaacagtcttgaaaaggaagaacaaagttagaagactcacacttcctgatttcaaaacttactttaagacaggatggtattggcataaggttaaaatatatagatcagtgaagtagaattgagagtctagaaataaaccctcacatttacagtcagttgcttaaggtgccaagatatttcagtggggacagaatagtcttcagcagatgtgccaggatgctgattatctacatgcaaagggatgaagttggacccattaataaataaactcagatccaatgtaagatccaaatgtaagaactaaaactgtacaactcctagaatctagagagtatgtgagtaaattatcatgaccttggattaggcaaagccttcttagataagacaccaaaagcacaagtgacaaaaatagctaaattggactttatttaaatgaaaaacattgtgcttcaaagggcaccatctggaaagtcaaacgaccacccacaaaatgggagaaaagatttacagatcatgtatttgataaaggactcagatccagaatatgtaaaagacttataagtcaataataaaaagacaaatagcccagttgaaagaagggataggccaggcgtcgtggctcatgcctgtaatcccagcactttgggagaccaggacgggaggattgctttaggctgggagttcaagaccagcctgggcaacatagcaagatcctgtctctacaaaaaattttaaaaattagccaggcctggttgcgtgctcctatagttctatctccttgggaagttgaggcagaagagtcctttgagcccaggagttcaaggctgtagtgggctgtgatcacaccattgcactcaggctgagtgacagaacgagaccctgtctgaaaaaaaataggtaagacagacatctgaatagagattttactgaagaagatagacaaatggccaaaaaggatatagaaagatgctcagcatcagggaagccaaaaccacagtgacataccacttcatacccgggaagaggaccataataaaaaaaaaaaaaaagggaagtaacgagtgttggtaaggatgtggataaatggaaattctcattccttgctgctgcaagtgtggaacagtacaaccactttggagaacagtttgctgttcttcaaattcttataacataaagctatcacacaatccggaattttattcctgggtacatatccaagagaaataaaaacatgttcacacaaaacttgaatatgattgctcccagcagcattattcataatagccaaaagatggaaacaatggctaaacataatatagtatatccatacaatggaatattatttggtaataaaaaaggcaaagtactgatacatgctgccacatggatgaaccttgaaaacattctaaataaaataagccagtcatgaaagaccacatattatgtgattccatttatatgaaatgtccagaataggcatatcaatggagacagaaagtagattagtagttactgggggctgggagtagccgtgagcaggaatggataattactgctaatggtttggggtttcttttgggagtgatgagaatattctaaacttagattgtggtagtggatacacagatctgaatataccaaaaaatcattacattttatacgtaaatgggtagattttatggtatatgaatttgatctcaatggtgatgttatgcaaaccaggttggcaggtcatagattgccaatcctttttatagatctaaccaaagaaatagtctatgtttatttctacaaaaaatgttatatgaatttttttgttataccaatactataagcttatttataaatgagagctgcacacagtgaatatgattaatttgatatattttctcccagtctcttactgtgtatggttttgtaatatttttccttagttgtgaaatatttaacattacttgctgtgttaaactcatttttatatataacaataataattattgttaatgtgatttattttgttagaagtaagtttttcattagtttttttggtttttttgttttgttttgttttgttttgttttgagatggagtcctactgtgttgcccaggctggagtgcagtggcgtgatcttggcccactgcagcctctgcctcccaggttcaaggattctcccacctcagcctcccaagtagctggaaccacaggcacacgccaccacacccggctaatctttgtatttttagtagagatggggtttcaccacattggccaggctggtctcgaactcctggcctctggtaatccacccgccttggcctcccaaagtgctgggattacaggcatgagccaccacgcctggcctttttgttaagttttaatctgtggctgtgataaggaaatagggatgaattttagaatgtcaggtctggagcattatattatcaaaccaataatgttgatggtaacttttaaacgttagatatctagtaaacaaaaagggactcactcggagtctgaaagtagggcagaagtgatggacagccataggaaggcttgtggtcgcacctgtgccaggtctttggcctgcagtgcttacaggtgagggacacatacttgaccactctgtgtagtttgtacttgattcagctgctgtctcttcttccctttggaaatgagatgaagagaattcattcagttgtatgttttttaccttcaaaatgtttctcattatggaactaatggattgcttttctaataaaaaatttagatactatacaaagtttatataatatatataacctggaaagattatctctaaagcttgtgcatatatatatatatatgtaaactttgtatttataaatatattttctggtatttttggaagcgccatagcattccattttgtcaatgtttcattcccctactgagtggcttttaggctgtggccagccttttgctaatataatacagctgcaggggacatctttgttgtgtccatctttacatatgtaacttccttgagataagttcttacagctctaatcacacatgaccttccctcctgttcccagggccgcgatcctgatgcccaccccaagagcacaggtgtcttccaggatgaagagctgcttttcagccacaagctccaaaaggacaatgacccagatgttgacctttttgctggcaccaaaaaaaccaaggtcagttccaaatggttccccacagtatgacttgttattgtattgggtgctgtctcaacagctcacctagttctctttgtaaattgttttgcttttggatattgaacttgggtcttgtttattctagctgttagagccaagtgttgggagcctgtttggggatgatgaagatgatgatcttttcagctctgccaagtcccagcctttggtaccagccttttgttctcaatactgggttgtgtgggaaagattctgggaaaggaaactaacgtccagttagatcattaaggaaaatcctaggagagtcgtgctgcttcctactaaatgaatggcaaataacatgctgaggggagcgtgtgtggaggatgcaatgcttagtttctgttgttcctcattttatgttccctatactaacattaaaacattaataatccaggctctctgactgtactgcacatctgtgtgatgtttaaatggttgattgaaagaccattgcatacactggggtgactaaatattcgtgcctttcaggtgcaaagttttgagtctgagttttagcctttctatgtcattttctcccccagccccagtaggtttttgtaagtactctgttttctttttatcgtagagaggactcctgtgacagccacagtcttcagaatgctatttctgaaatgctacctttgagttggttcagccctcatttgagaaagtatttttaagactcagaagccaggattgttttttgcattatgatttttccttaaaatttctaagatatttgatggctttttggtattttttttcttttgaaggtacaagagaaaaagagagtagtgaaaaaagaccactctgttgactctttcaaaaaccagaaacatcctgaatccattcaaggtagtaaagaaaaaggcatatggaagccagaaacacctcaggttagaaattctctttaaggattttcagctcttgtttgcatcccagtacagagaaattccattatgcagacccacagttattcagacttgtctgcattaaggaggaaagagcaaccagggctaccgctttgtcttcactgcactccccccaagtcatctcccctctcctcgctccacacgccagagtttcatgaatctatactttaatagttagtgttttttgatgccatgccagatttgactctgaagtggagttaaggtaggatgaagaatcttcttcccactaaagaatttatttctccctctggatttccttggaatagaattaaaatagaaataaatataaattacatctgatttcctgcctgctctcagtgttgcctctcccaaggtcattgctgttgggccgtactctgcagcagtcttcccagaacgctgtggagctcctcctgggaacagcccaggactggagagcgagtgccagttccacgtgcaggtgtcccagggtgtctcactgaagccttagtgtcctgagccgtaaacctgaggcacttggacgaacacatcaccactgacccttcctggggctcagatcttttgcttttagagccagtgcattaggctatggttgaatttttgtgtgctccttgaaatttctatttgataaccaacatggtaattttgcctgctggtcagttttaggtgctctgataaactgtgactcttgggaatcttactcatcttgtattccttgactccatatctgatctggcagctttccacttacgtgacagaggaggaggcatacgtgaagtagtgctagtgaaacatcaggccccaggagagatttgaatgcctttcccattaaagagctacagaaagtgacagttttgctccatcacagatttatttacaggcataagaaacacttgtctttctgtttcccaaatggatttttaactggatgtaattttacacaggactcatcaggtctcgctccatttaaaaccaaagaaccatccactcggatcgggaagatacaagtaattaaaacactggaatcttcattgcctgccctgtggcatctataaacttttttgggtttcctacttttgtcagctgctgccaagcatcttctcatctcttcccccgcctcccctcccctgcacctagttgttgtctcctgtgtgctgcgtctttaacatctattttttgagcccagtggtgggcataggtgtaagacgctctgttttaattctgagactagatcgggcgattttcctacgtttctctactcctctcgtattatacattatgtgcaccgaatcttgtcatgtgtcacaataaagataatagactgctgtgttgaagaacaaatacagagtttcatttttcttctttaggcaaatttagcgatcaacccagcggccttgctgcccacagcggcttcccagatctctgaagtaaagcctgttttgccagaattggcttttccttcatctgaacacagaaggagccacggtctggaaagtgtgcctgtccttcccgggagtggggaggccggtgtgagttttgatcttccagctcaggcagacaccttacacagtgcaaacaaggtgatgaaaccatctttgcttccttgctctcttcttttaaccagaacgtgcatatgcttctttctagtttatcaattgcatacacagcagtctttgactctccttttgaaggaggtgcctcatccttccttcagccactccccactccattctccccacccccctcatcctgcacctgcttttccgtggcctgcatttggtacatttgcattctgctcagtagccacagtaacgtctcaccactttggctggtgtctgacacctgcaggtttccagcactgccacctgggggtcttctaaccacagagcagatcatgcccctcctgctggcgcttcctcactactccaaggagagcattcgggctcctgggtttggtatgaaacccctttgcaatcggtgccagcccatgtgtgcagcttcctcactagtcacttcacactttccagcctgactccaggcacaccaggtgccactccctgaacacacatggtctgttctgttgctgcccaaggctcctgctgcctcctcaccaggaatgctcctctctgtccacagctgtgcttccacatccccacttctgtgactgtgccctgcactccccgcaccaagttcccacagcagcgacactgtttcatgggatctcctcaatggactgtgaaccctttgaagttttcctttcattgtagttgggtttcttgtttctatccagtctcccttctctagaaagctttagctgatttccaagtaagcgacaggacacagaatgacctaccccggcaaatagattcatttcaaatgtttccaaacctgtttccttgtgcaaaacaaaacagccttccttttaacgagaattttcattggcttttttttaattaagtttaaattggcaactaaaattgtgacattcccctgaagttgacaacacaatcatactttgcccaaagtagattgtagcttctcaaaattctacttgattgtatattttggaaactatcataaacactgcatcattgctactaagtgattcatgttttgagattatatgaaaagttctgatttctaagccatatttcttatgtggaatatttaacatttgaattcaatgtttattgacttgaagaaaacagcaccctagattacctctctttattgtgtcatgtttctccccgctcctggagcctgaatttagactagccccctaacaaaggttagtaccagaattccccgattctttcttgttttgaaagatacccacgtttctattgagggtagagtaggggccaagggaggggttgtgagacagagagccaacatgcctactttccaggtttccagcaacagataaaactttttgtgtgaaactgaactgaaactgccctgagaagattaaaaaatggagaactctaaaggattaagaatgacttagtcttggagtactaggagctattaaactccttccttggaaatcattaagaaataacctcttctatgttcttagataatatcttcattgaagtagaccagataaccttataatattttgagtcactgattctttgccatggtagctttgaacactttattttgtcgtcagatcaatgtgtgtttttttgccattgcagagccgtgtcaagatgagagggaagcgtagaccgcagacccgtgcagctaggcggctggctgctcaggagtccagcgagactgaggacatgagcgtccccagaggacccattgcacagtgggctgatggcgccatttccccaaatggccatcggccacagctcagagcagccagtggagaagacagcactgaggaggccctggcagctgccgctgcaccttgggaaggtggtcctgtgcctggagtggacagaagcccctttgcaaagtctctgggtcattccagaggggaggctgacctttttgattctggggacatcttttccacgggcactggatctcagtctgtggagagaacaaaacccaaggcaaagatagcagagaatcctgccaacccaccagtgggtggtaaagcaaagagccccatgtttcctgctctaggtgaggccagcagtgatgatgatctctttcagtctgctaaaccaaaaccagcaaagaaaacaaatacctttcctctcctggaagatgaggatgacctctttacagatcagaaagtcaagaagaatgagacaaaatccaatagtcagcaggatgtcatattaacaacacaagatatttttgaggtaataggacttaacacgtttttgtgtctgttctaagttaaggaaggtatctgattggcttatttgagccatagattatgtctagcttgttgcgtgcataccccatagccacttgcttagtaattataattaggctcttttattaataagtctaacattgattcagaagtggttttttgttttgttgcatgtagattgcatttcttggctggccatgatcattgatactggtcttggtttctctagtttttacagtttttttatttttatagaatattgttgtaatcagcttcctgggcatgccactcagtgacatggcatacagctccactggtccagcttgggagtttaacctctggttctggggacattggccctggctggagctgacaatgtagtgcatgcaggcaataagactttcagtggcatttgctcagcagatgtttattgagcacctggggactgcaggcacgaggtgaactcagagaagtgctaggctcctcagagctctctgggaagataatcaaatacaaacagggcaatggataattaagatgttttcaaatagtactaagtgtcatgaagaaaataacctggggcagagtggtgggtagggctgggaggtgctcctttaggcaggactggtagagaaggtgtcactgcagtgccggcatttgagccggggtgagatgggcgggccaagctgtgcagagatctggggtagtgcatcccaggcagagtgggcagtcttgaggctgttccacacaccctggccaattgcatttccatagctcgttgttgtgtttgagcttaaaaagaaaaattgatttaacattgttttgtatgtatttttggcttaacaaggatgatatatttgctacggaagcaattaaaccctctcagaaaaccagagagaaggagaaaacattggaatctaatttatttgatgataacattgatatctttgctgacttaactgtaaaaccaaaagaaaagtccaaaaagaaagtggaagccaagtctatatttgatgatgatatgggtaagtttggttttctacatctgacctagagaattcttacctttctgtcacttggtatttttcttgctaccttttcttggcccttttctggaaaatgcaccccagcgggttcacttcagtgtaatcctgagttaggctgaagataggtaagagatggactaattattttagtgaagtaactctttcctatgatagtcatcaaagaatttgaaggcacccagagtttgacgtttaagtataatttaactttgatctcagtgcacctcaccaatcatctgtgacacaccccggtgttatgaaaggaggtttgatcagaaatgacctcacgtgctaaagtaggctgaggggactgccttgggtgtgatgtggttggttgagtcagagctccagatagacagggagtgtccatggttctgtgcgagaagagagcaagtctagacctgggtgtaggctctacctcaggcgttgcatttcactgaggtctttggtgtttgggaacaagcttgtcttccttatatggcacaacttctgctttattagtagacaaggcaaatgcccgagaaccctaaatattggacttttgataaatcctgtgggctgaggccacatacacatttcctactctccccatcaatctagaccttgagactaactgggagacagctggtgctgcagagtcacacactggctctgtgcctccagcaagccgtgtgctctgtctcccctgcttcccgccacatggagtgcagaagggaactcattcattattttaaatacaaaaaaagtaatacatgcttattgtaatagattcatgcaattcagaaaatgtaagaagtgaataacccctagaggtaatagtaacagtttggtgtgtatcctttcagacacagtgatattaatatatgtttgtgtacacatcaatatatacccacctttttaaaaagtaagaatatatttacctattctgctctgtcttttagttacttaatgtcttttcatgtcagtacatagagatctccttccttgttttcagtggtgtgcacgatttctttgtatttagccattagcctgttgatggcaatctcagttgtttctgttttctttattacaaataatgctgtggtctttaccatttgtgtacacctaactttatgtatacatgttaaatcatggttggataaaaccctagcagtaacattactgggtaagtaccataattagataagacaagcttttgagtcagtgaaacactaaaagaatgcagtgacggaggcttacagtcttacatcgagatgcctcaaatcagtgcatttattctgaaagaaaacaggtgggtcctatgttggatttccctttgcgtatttttattgctcttttaaaacccagtatgaaaagaatatctaaataagtccattgtccctgatggtaggggcgtgggctggtttggagatcaagttacgcttcccttttttctgtcctacacacgcacatacatacacttttgtagctgaagaaattgtgctccaagagaaacctgtgtgtgatcataaaatttaatgagtaacaaacacagaaccagaatctaagaggcttgagttctaggttagtgttttagggtactccatgctgttaccagagctgggtctttggtggtttgcttgcatgtgtcttaaaagtacctttctccacccctcttcagcaaccgtttttcttttttctttctaaagatgacatcttctcctctggtatccaggctaagacaaccaaaccaaaaagccgatctgcacaggccgcacctgaaccaagatttgaacacaaggtgtccaacatctttgatgatcccctgaatgcctttggaggccagtagagcacacagggtatccacaggttaccctgcagctacattgttgagttagtgatgatgttgtatatgctgatggtcttaactggattacaaaaagcaaatactagaacagctagctcatcgttcacccaatgtacttggtatttttctgcactggtttaatcatgcttaatactacaaaacaaaaataaatatttcacagtggttggtttgttttgtttttaaaccacagtttgatttagttagccttgctggggccataatatgcttcagggtgtgtaaaagaagaaatctctttgtggctttcatgggcagggaatcccagagatagcaaatgccacctgaccagaagtctttgttatatggatgggaaccctaacttagggcctgggcaggggaaagagaaagaaggtgagagattatacttcatgagtcttagcaatatgggagcaggttttcactgaattctgagggtgcctctgcatgtcctccaaggcaaagtttggcaaactgtggcccccccactgtcatattttgttaataaaattttattggaacacaaccacattcatttgtttacttactgtctgttgctgctctcaccctacctccaatgtaagagttgagtgattatgacagagactggatggctcacagagcctcagatgttttctatctgcccctttatataaacagtttgctgaccattgctctaaggcatccttttccatccttgtcttgtggaagcagcagaatgaacctaggtaatagccaggggaagtgctgaagatggaaatgtcagcctctagagcagcactgccccatagaactccgcaggaatgaaaatgttctttatctgcatcgacaaaggcagtagccactagccacctggatggctgaccccattctaatctgtgttttttggtgctctgtcatcttgctgctgactattcagcctgtcaccacagcacagtcttgtaggccgcccaggttggtctcagcgatcctggagctacttacttcttccttgggcactgtaagatcggaaggggaattactcatacccagagtcaaacattttgtacagcttccacaggtcaaccatatgcccaagtctgctgtgagagtgacgtgataacagataagggcacttgctagttggccactcctttcccctattcattttatgcatcttccttctgtccttaggttgagatctccgagtcgctgttgtcaggcagactgctgtcctccagattcaggcctgtgggtctggggagccctgcttggtcttggaggagcaagggctgcgcaggtgacttggtggcctcaagtgtataggtacctggatggtgcgaggagatgctggctctgaaatatttcctaatcccgcttgcggatcaactgctgactagcgtttaggttacagatatattagacggttgatgtgattctgtagctcgtatttagaactttagggatgttttcacatatcagtaaatgaagatctatgtaaacatttttttttttttttttgagatggagtctcgctctgtcacctgggctggagtgcggtggcgtgatcccggctcactgcaaccaccgcctcctgggttcatgccattctcctgcctcagcctcccgagtagctgggactacaggtgcccgccagcacgcccggctaattttttgtatttttagtagagacaggttttcaccatgttagccaggatggtcttgatctcctgaccttgtgatctgcccgccttggcctcccaaggtgctgggattacaggcgtgagccactgcgcccagcctatgtcaacatttctaatggtagcttcacattctggatatctttatgttggggaaaaagttttaaaggtaactgctcttctgtagcaaagcttttttagagcagaggatggagcaaattctgagttactgaaattacgtattcagcgctattgccttgtttaccttccatttcatctttggagttgtgtttttagaactttttcagaagggatgagataaatgctttgggaattgatttagaaatctttttggtgtctttactcttaagagctagatatattttttaattgtaaaaaattatggaaatacttttttctctacctgctcccattttttttttttttttttttttaaagacagggtctggttgtgttgcctaggctggggtgcagtggcataatcatagcttgctgcacctttgaactccagggctccagtcatcctcccaccttagcctcctgaatggctgggactacaggtgtgtgccatcatgcccagctaatttttaaaaaaaaatttttgtagagacaagggtctgttgcccaggctggtctcaaccttcttacctcaagtgattctcccaccttggcctcctgaattgctggaattacaggcatgagccacaatggccagcttctttctgttttctttgtttcctcttccccttctgttttcttcctttttcttttttcttttttcttttttttttttttagctgttcttgcatcattttccatcccatctttaagtcttcattgcctcctcattttccaagatcatgagtcccacagtatgctcagctaagcatgaccacacaccatttcaagaagctgttcatggacccagattttattaccagctgggtctttgttctcctgctgcagcttccatttgctcctcagctaccctctaggcatccagtctggcttaaccagatttcatggcctcattttgtcctctgctacagtgatttctactcctgaggagaagcataactatcttctagagggaaacattttcgctcttggttatcaaccttggttcttttgggatattggaaattaccccattgactggacccagacttacggtggaagttccagcacaattaatgctgaacggggttgtgctttttcttctggcatatagttgaattatccattctcattataggtgaaggacttgcaaatctgtttgttatcttctaccctcccccagcctattattttcagggtctcactatggaagaacactgtggtgaaggaaacaatccagattcctttggcagtcatagtcactcatgtctttatttctgtcatgtgcattttgcagtcctgacacctgacttctgttgctagggctgcacctgtgtaggtacgagtactgttggcttcggggatacacactctggcaactctataggacagtcttatttgatatagcataagtatgtttttaagaattcatgttatccaaaattataaaagcagttgtttgaatgagtgaaagaaaggggattaaggttagaaagctccatacaaagtcatatataagcaatgcagctttttaatttagcttttatttaagagcaatgaccctttaccactatcgccagcagtattattatcctggtaccttgtattactcttaatacccatcattttgaaatatggtgcaacaacactcaaatgagctgcactacaagaaacaactttcctttctgtaatgccctccctttaggatcactagaagtctgtacaatgcaatgcagattcccgaattaatgatctttcctatcagtgtaataaaaactcatattatggcagattcctgtatgtgcatgtatgttatgagttggataaacgttggtggacttcatttggagtgaatcagaatgggattcctgtgagaagccaacatccctctaaacaaacttttggagcatgatatggcttggatgttttgtccccttcaaatctcatgttgaaatgtgaccccagtgttggaggtgggcctactgggaggtgtttggatcatgggggtggatcctcatgaatgtcttggtgctgtccttgtggtaatgaatgagttctcactctgagttcacatgagatctggtttaaaagaacctgggggccgggcactgtggctcacgcctgtaatctcagcacttcgggaggccgaggctggtggatcactaggtcaggagatggagaacatcctggccaacatctagaaaccccatctctactaaaaatacaaaaattagccaggtgtggtggcacgcatctgtagtcctagctactcgggaggctgaggcaagagaattgcttgaacccaggaggcagaggttgcagtgagctgagatcgtgccactgcattccagcctgggtgacagaggaagactctgtctcaaaacaaacaaacaaacaaaaaaacaaaaaaacaacctcacacctccttcctctctctctctcttgttctctcaccatgtaacatgctggctcctctcctcctaccatgattgtaaacttcctgaggccctcactggaagcagataacagcattataccccttgtacagtctacagaaccatgagccaaaataaacctcttttgtttataaattgtccagtgtcaggtattcctttatagcaacacaaacagctaacacaggataaccaaatagttattaatgtctaaaacttggagaataccttacctatagcacaggtttgttctgaggatcaattgaaagactaaaatatctgttctttccttgaacaaagctttaatgagtaccaatatgtgcaaaacactgtgctaggtggtagagatcagatgtgctcccttcagtttagtaataaatgaaattgttagggactgggtgcggtggttcatgcctgtaatcccagcactttgggaggccgaggcgggtggatcacgaggtcaggagattgagaccatcctggctaacacagtgaagccctgtctctattaaaaatataaaaaattagccaggcgtggtggcaggtgcctgtagtcccagctattcaggaggctgaggcaggagaatggcgtgaacccaggaggcggagcttgcagtgagtcgagatcatgccactgcactccagcctgggcgacagagtgagactctgtctcaaaaaaataataaaaataaaataaaataaagaaattgttatgggtgcaatatatgatgtaggtagtagtgtaaagggggtaggtataaaagctttgtggaatagttgatattggagctgaatgttgaaaggtgattaggtgcttgtcaggtaaccatgtgtgcacatgacagtaagtagagcagagcaggagcaacaatatagaagctgaagtgttctgaagctgcagatgcagatgattagaggatagaagtaccagagatgttgcaagatgaggtgaggttgtagatgggtaaaatggggccagaatgtgagatgcataatcttgggagcatttctaaggagtctgaattttattctatagagagggagaagtcattataggaccttgaggcaagaaataacatgatcagctctacgttttcaaaagataactgtgctccacattatgtgtcattagggaaatacaaattaaaacagcagtgacgtactattacatgactgttacaatggctgaaatccaaaacactgacaacaccaaagttggggaagatggggagcaacaggaactctcattcactgccagtgggaatacaaaatggtactttggaagattgtttgacaacttcttacatattcttactgtatgatccagcaattatgctccttggaatttgcccaagtgagtagcaaacatgttcacacaaaaacctgcgtgcagatgtatatggaagcttttttcataattgccaaaacttggaagcaaccaagatgtccttcagtagatgaatgtataaataaactctactatacccagccaatggactgttattcagcaccaaaaagaaatgagctatatcaacccatgaaaagacatggaagaatcttaagtgtgtgttactaagtgaaagaagccaatctgaaaaggccgtatactataaaatcccgaattacgttctggaaaaggtaaaactatggagacggtaaaaagtgtagtgtttgccaggatctgaggggagagaggaatgaataggcaaagcacagaggatttgtagcacagtgtatgtattctgtgtggtactgtaatggtgaatacacgtcattatgcattagttcaagtccatcaagagtgaaccctaatgtaaattacaaacttcaatttatgtgtgaaaatgatgtgtcactgtggggttcatcagttgtaataaatgtaccactctggtgcaggttgtgataggagaaggctgtgggagtgaggggcatataggaacattgtaatttctgctcagttctgctgctcaaaaaatgaaatctattcaaaaaggaacgttttcatgtttagactaacttagttcatttccctcatttagttccttaattgttgaggtttcattgcaatgcattctaaagtcaaacataaaatcattttagagctttgtgtgacttttccccttgcttaaacatcattgcagaataatgtaaaaatatgatactctaatctagttttcataaacttttttcaaagttgaaaaaaaaactagcatcatggacagatgggttgaaagagtgaacggcaagaatagaggatcaaaactaggccatgaaaattgctcagttgagagctaatgaagccctaaattaagtcctaatcattgtagatggagtgggtgacagatttaaacaatattaagaggctgggcccagtggctcatgcctgtaaccccagcactttgggaggccaaggcgggcagatcacaaggtcaggagttcaagaccagcctggccaatatggtgaaatcccatctgtactaaaaatacaaaaagtagccaggcgtggtggtgcgtgcctttagtcccagttactcaggaggctgaggcaggagaatcgcttgaacctgggaggtggaggttgcagtgagcccagatcatgccactgcactccagcctgggtgacaaagcgagactgcgtttcaaaaacaaacaaacaaacaaaaaacaatattaagaagtcatattgtctagaattggtcatttctaggtgtcatggggttgggagaaaatccaaaattattgacagatcattttgagtgatggcatgaaaggcatctctttaccaagctggggactacaggaaagctggaggtttgtgggaaaaattataagttttgagtacattggatttcagatgcctctggaatatcatgcttatggagtggagattactatcaaaaccacaatctttaaaaagaactgcttctttaaacatgcttatattgtagtgagttcagtgatatatcctttggtagaaaaaattgtaaaaaaatttatgtatggcacatttctctgacgcttgcactttcatagtgttcactttctgttcacctaggtttacttactgatatccttctcccactctgaggctttgcctatcctgaaatacatttaaaaatttacccatgtcagaaacacttcccaactcatcctataaggccaatattaccctgataccaaatccagacagacataaagaaaactacagatcatctcttatgattatagacacagaaatcctgaggaaatacttccagaccaaatccatcaacatatgtaaaggttacatactatgtccaaatgggatttatcccagtaatgcaaggttgatttgacacacaaaaattaatgtaatatgtgaataaaagaggaaagaaaatcacatgatgatttcaatagacactgaagaaagcatttgacaaaattcacaccccttcatgattaaaaagaaaccccactgaaataggaatagaagggaagctcctcagcctgataatggttatctataaaaccccacggttaacattacaactaatggtttccttctacagtcaggaataagacaaggatgtccagtctcaccacttttattcaatcttatactgaaggttctagagccaggcaattaggcaagaaagggaaataagaagggcatggtggctcacgcctgtaatcccagcacttgggaggccaaggcgggtggatcacctgaggtcaggagttcgagaccagcctggccaacttggcgaaaccccatctctactaaaaatacaaaaatctgcctggcgtggtggcagatgcctgtaatcccagccacttgggaggctgaggcaggagaatcgcttaaacccagcaggtggaggttaccatgagccaagattgcaccattgcactccagcctggacaatggcgcgagactctctcaaaaaaaaaaaagtgggggagggaataaaagggcatatagattagaaagggagaagtaaaactctatttgtaaatgacatgatcttgtatataatgcttttatatagaagatctttgggaagaactaaataactaaatgaactaaatagttcagcacagtggcagtgtacaagatcaatatattaaaatcagttgtgtttctatacactagcaatgagcaatctgaaattaagacagtgattccatttataatagcatttaaaggaataaaatacttaggaataaatttaacaaaagagaacaaaacttgtactctaaaaattgtgaaacattgtggaggtaaattagatataaactgaaaaatagtacgtatttatggattagaagtcttagtattaagattgcaatactctccaaatctacagacttaatacaatccctgtcaaaatcccagctaacatttttgaaaaattggcatacttaaaattcatatggcaattcaaggagttcagaatagccaacaatctaaaaagagaagaacaaactggaggactcacacttcctaatttcggaacttactacaaagctgcagtaattaagatagggtggtactggcataggtagatcactagcataaagagtctggaaataaaccttcacatttacaaaaaatggatttttaaccaggatccaagacaattcaattgggaaagaatgatttttctgacaaatgatactggaacaactgtttatccacatgcaaaagaataaagttagaccctaactctcaccatacacaaaactaaattgaaattggacaatacacctaaatataagagctaaaactatacaattcttagaaaaatatatgtcaatctttactacttgggataggccaagcttttgaagtacgacaaaagaaaaatagccaaattagactttaccaaaattaaaaacttttgtgtctcaaaagatgccatcaagaaagttaaaagacaacccgcaaactgagagaaaatatttgccatttatatatccgttagtgtttctatctagaatatgtaataaaaaaactcatacaactcaataaaaaatccaattaaaaatagacaaaatatgtgaataggcatttctccaaagaatgtatgcaaatggccaataatcacattaaaatgatgctccataccattagtttttaaagaaatggaaatcacaatcacaatgagatactacttcacacccactaggatagctttaatcaaaaagacagaaagaagtattggcaagggtgtggagaaattggcaacctcattcattgttgatgggactataaaatgatccataccatttagaaaagtttggtagtgccacaatttgctaaacataagagttaccacataacctagcaaagctacttcaaagagaaaggaaaacatatgtttacacaaaaacttgcagttgaatgttcatcttagcattatatgtaacagcccaaaattggaaatgactcaaatgctcatcaactgatggatggataaacaacatgagatatattgctacaagggactattattcagcaataaaaaggaatgaagtactgatatatcctagaacatgatgaactttgaaaacattatgctaagtgaaagaagccagtcacaaaaaaatcacatatgattctatttatgtgaaatgtccagaaaagaccaatttggagatagaaaatggattagtggttgcctagggttgagtgggggactgggggaatttgagagtgttggttacagggtatggggttccttttagaggtaatgaaaattttctggagcaaatgtggtgactgttgcacaactctgtgtacataataaaaaccagtgaattttaggctttaaatgagtgacttttatggcatgtgaattatatttcaataaagctttttttcttctttttttgagatggagtcttgctctgtcacccaggttggagtgtagtggcgtgatgttggctcactgcaacctctgccttctggactcaagcgattctcctgcctcagcctcccgagtagctgggattacaggcatgcattaccatgcccaaaaattttttgtattttttggtagagaccaggttttgccatgttggccaggctagtctctaactcctgagctcaggtgatttgactacttcagcttcccaaagtgctgggattacagatgtgagccacttcacctggccctcagtaaagctatttttaaaaaggtttaaccacctcaccagaaagacgtgtatcatttgtcctagtttaagttcaaggcccccatttacaaatttttcactgattaatagtcttttcatgtcactacatagagatctccttccttgttttcagtgatgtgcacctctgggtctttgcactggctcctgccactttttcgaacactgttctcagaatccagcttgtttcctcactcttcgatttctctgtgaggcctcgctgatgaaatacacacaacaggaagcctgctagcacataccaccctgtgctcctggtcccctttcctgtttcactgtttaccacggcacgtgttgccaggggcaatgtatatttacttattcattgtctctacttcccactaaagtaagtgccacataggcaggacttttcgttccctgtttgtatccctaacaccctgtccttaatatcagtgcttggcatgtggtaagccataggctcttgtggctacacaacatgtgctctgttctcaagtggggtgattctgtcgatgtctggagaaacttcgggttgccatgccttgaggattaactaggtgctactgacatctagtagctggaggccagggaggctcctgaacactgtagaatacacaagaccaccctcaacacaaagaatgattcagccccaaatgtcaacagtgctgcggctgagaaaacctgtgttagaccagcactatccaatagaaatacaaccaactggtcgggcccggggtctcacatctgtaatcccagaactttgggatgccgaggagggtggattgcttgagcccaggagtttgagtccagccttggtaacacaacaagacattcaacaagaaattaaaagattagctgggcatggttacacatgcctgtggtcccagctacccaggatgctgaggtggaagaacaaattcagcccaagaggtcaaggctgtggtaagccgtgattgcaccactgcactccagcctgggcactgaggccacacttcctataggctgctcccagccagaaccgagcatgccagggtactagtgccacctgttcctgcaggacaagggaatcctctaacagtcaatagtccaccagagactcccaactgatccggccaaaagttcctagagctgtgctgtgtctcggactcctcctgccctaccttccttccttccccctctcccctctcacatggcagtctgaaggctctccctgatcactcctggcccctctcttaacctgcacacgtgcatccccaataaatctctgctgatctcatcctaacttggtgtctgcttctgggaggattcatactaacacaggtttcaaggtcggacagcattcaaatcccactcccaccacagaccctgagccagttcctacccctttctcagcctcagtttcctagcaatgaaaagaatattgaaacagaaactctttgaaagctcttcctgtcctgatctgttccagaatcgggctcagcagggttcctgcaaggacacaagtgtagctgcctctgaggagcccctcaggtgcccattttagccagtttgtttctccctgggctcctacagcacatgtgcccatcacacagggttgcaaacacctgttttctcctctgattccccaaagggtgctggacacctgtagaggggctctgttttgttcacttgtccatgatgctcagagaatgtttacagtgcacagtgaatgccgagcactggaaatgctcagtgaagcaagccaacaccagccccaccagctgtcagcaaggaggagttctgtggctatagtctctttggttccatggaaatgacaccaacagcccacataattgagggccctgtgcaggtgccgagttcccagcaaaagtctttgcatgtattttctgttatatgaatcctcctggcatgctcattgagaggttccattagtacatgcccatcttacacataaataaactgaggctcagggaactggagttgattgtcccagcctgcacagcaggaagaatcaaggggtgagttttgggttttattttgcatatttcagcagctttactgaggcataatttacacaccataaaatttactcacgataaatatacagttagatcagtaaatctatagatttgggaaaccgtcagcacaagccagttttagaacatttctattaccctgaaaacatttctcttgcctgtttgcaggcaatcttccattcccacccccagccctaggcaaccaccaatctgctttctgactctacagatgtgcctttttctgcacattccctctaagtgaaatcatatagtgtggccttttgtggttggcttctttcacatagtgtaatgcttctgaggttcatccatgttgtaatgtccattgtggcttcatccctgtctattgacaaataaagttctgttgcatggatggatcacaaacatctacatatccattcttcagctggtgcacatttgggttgtttccagtcttgagccattatgaataatgttgttatgaaaatgtgggtataagtttttgtgtgagaatatgttttcatttctcttggttagatccctaggagtggagttgctgggtcacatgataagggtaagttatacaaggaactgccaaacttgtctatgtaaattggttgcccatcagcagtagatgagggttccactgctccaaacagtagtgctgagattggaggcaagtccagcccaaccccagaaccccattacccagctctttggtgatcttttctaacattgggatacccagctaaggaatgaggatcatagctgtgcaggaatgagggctgtctgtgaaaacaagaagtgctcctgcaccagcccagacaaagaccccccacttatctccatttatttcttgtcctccaagtgatgctggagcccctgggtttccccacatacaatccctcaaatttctgacccctgctatttatcttccattgagccttaggttctggtgagagtaacaaggatagacaagggttcacagcccagagctagggatgccctataccctgggcagtgaccttggaagggctgattcagctggaactcaatattgaagcacctaggatgtgcctgtttacacacagaaaaaagataatgcagaagcatggggtccctgattagctgatctgagctgggctggggcttggcaatcattggatccagtgcttttcctaaaacatgagcattgagtttcctgcccacacaaccctgggcttaattaagtccaagcaacaaacagggtcctcagtatgcttaaagcattgacattggatggaagacaattcaatgtttgagaaatccctgcagaccctctgggaatgttttgaattctaaggagaccatcttgccctacttccttatttgacagaaatggaaaactgtggctcactgaggtggagtgaaataccccaggtcatccagcaaggtgagggtggagcaaaggcttggtcccatagcatatattcatccatctccttgcccatccattgtcttccagcagaatgtaagctctgagaagataaggattttcctctccttttctacaactgctgtcttccttgattctagcacagtggctggcacaggttgggtgctcagtaaatatctggtgaattggccaggcacagtggctcacgcctgtaatcccagcactttgggaggccaagacaggtggatcacgaagtcaagagatggagaccatcctggctaatatgatgaaaacccgtctctactaaaaatacaaaaaaaaaaaaaaaaaattagccaggcatggtggcgggtgcctgtagtcccagctactcaggaggctgaggcaggagaatggcgtgaacccaggaggcggagcttgcagtgagcagagatcatgccactgcactccagcctgggcaacagagcgagactcagtctcaaaacaaaacaaaaaaaatccagtgaatgaacccaagtgccctgacttctctgcttcatttcagaaagctgatctgagcacctactatgtgctacaagctgtggcaggtactggggataagatttgagcaagacaggacccttgccttcaaggcacttagttctcaagggcaagacggtaggtatacagctaggcacagaattctgtgactacagttttttaaatgctacaaagggatttggggcttgtgtaatctgaactcagccaggaggtcacagaagactttagaccaaggtttaaaataaagaggctgaggcaaggctccagtcccagagcatccccaggaggcctaccctgttcttccatgagtgtctcctgattggaaactcttgagtctaggaggtcaaggtgggaggatcactggaagccaggagttcaagaccagcctcggcaacaaggcaagaccttgtctctacaaaaaataaaaattaaaaataaataaaaataaaatgttagagagagagagagacacagacaccagcctaggtaacatggtgaaaccctgtctctacaaaacatacaaaaattagctgggtgtggtggcatgcacctgtggtcccagctacttgggaggctgaggtgggagaatcgcttgagcctgggaggcagaggttgcagtgagcaggaatcacacgattgcactccagtctgggtgacagagcaagaccctgtctcaaaagtgagagagagattgagataaacagcagggtctgactggagctaaattaatgtgctgagcctcgactaactgtcccacccactgagcagcactgagcacagagggtaaaccctgcaaaggaagtgaccagcttagagaacactgttcatcactccgaggcctgatgttaaccaccctgaggcttcatattaaacagaacacaataaaaatgttctgggtatgtttcttgtaaagagtcccttttttttagagatacgtattaaaatatttacagatgaaatcatataatgtctgcatgttgcttcagcataatattacaggggagaagggttaggctgatggccattagaacatgctgacggtacctgagttctgtgtatctttaggttaaaatttgtttcagctgggtgcggtggctcacgcctctaatccaagcaccttgggaggcagaggcgagtggatcacgaagtcaggagattgaggccatcctggctaacacggtgaaaccctgtctctactaaaaatagaaaaaattagccgggtgtggtgggggcacctgtagtcccagctactcgggaggctgaggcaggagaagggtgtgaacctggcaggcggaggttgcagtgagccaagatcacgccactgcactccagcctgggtgacagagccagattctgtctaaaagaaaaaaaaaattatccgaaaagtttctttaaaaaagcaaaaaatgtaaatatatatgtagatagatcaattacatgtggacctggagcagccaacgccattgcttctcgttcccaccagcagccaagactcctcaagctgaaatgtttgggtcagccacacctttgcaccatggcttcctttgttcttcctgaagtctttcctaattgtgctggcatacaggctttccagcagggaatcccctgtttcagaatttcttcctagcctgactaaagcctttgctggatcttataaatcacaagatttcacaggagatgcagccctggatcagatactcactaacacctcttgtcttcccttgagtgctgggaaagggatgctggagactgggaaacattttgccatttgcagtcttaggagatctttgtaaagatttctccctctggatggttttgaccagggcattgccaaattccatgtcccaagagtcttggtttctggatcctcctgagcctttgagtttcccatgaggccacagctgcaagggaggctgagccaagtggccgtaacaaccgggcagagtagcgggcagaagcaggggcagggtgcaagcctctcctccccaggagaggaacttccctgtgccaaggggaatgaagggacccaggggatgcgtagcagacccggtgccctacctcttttcatagtctaggttccccacagaccccttcatcagctggcttactgttcacttcaaggtcatgacatcagctgtgtgatgtggggacagaaatccctggcatggcctctatgtcatccctctgcagacagaggaggacgcaggcttggccgggatgctggagtcactgtggatatagaccctggcccatttgactcaagaacacatacataactggaaccaagaggctgggttaatcccctcaaggccctggccatttggaagaccctaaacctccttccaggtggccatgctaagcaaagccacttgcagccacccttccacgatgcattctacatctgagaaactgttgctgtcggccatcctggccatcatcttctgtggcatctgctgtcataagtacatgaaagtcaacatctcggagcagtcggccaccaccatgcactacaccatgaagatgctggccagtggcaccaataccatcttcatatccctgggcatctcgaccatgaacttgctcatctggacgtggaacatggccttcatcctcctgcactggccttcaccttcatgtaccgagccatggtgtcatccagtcctgactcctgtactgctattggatgatgcagctggagatcatagaccaggtggtcatgtcctatagaggcctgcatggggccatggccttcatcctggtcgtgcttccggacagaaacaaggtcaaggagaagaacctgtttgtcagcaccaccgtcatcgtcttcttcacagtcattttccggggcctgcccatcaagtccctggtgcagtggctgaaggtgaagaggagtgagcaccaggagcccaagctccatgagaagctgcaccaccatgctttcaaccacatcctcttggccatcaaggacatatcccggcatatcaggcacaactatctcagagagatgtggtcccactttgacaggaagttcctcagtggggttctcatgagaaggctaacccagaagtctcgagatgagatcctcaatgtcttccatgagctgaacctgaaggatgtcatcagctaagccatcagctaagccaccaagggagagtgcctaaggtccgtggccttcatcagctccccaagtactgataacgtcgtcaacatggacttcacgccatgatcgtccacaacggtggcctctgtctcttaccttctgagggagaacatcagtgccgtctgtctggacgttcagtccctgaacgtggcagacgttcggtatggggaggaccccgtcacgcaccacacgctgcagcagtacctgtgcaagccggggaaggagtacattcgtcgctacagccacaccaactgaggacgagaagcaggagcaggaaatcttcgacaggtccatgaggaagcacctggagtccttcaagttgagcaagctcgggatcaaccagaacaagaaggcagccaagctgtacaagccgaagagcgcccagaagcggtaaaacagcagcatccccaatagggagctgcccaggtagagccccgtgcacaatttcaccattcaggagaaagacttgcaaatttcagacacggaggacgcccccaactatgatgctgaggagacaagggacgggggtggtgtcagggcgagtattgggccccagcctcgtcgccagagtgccaccctggctgtctcctggggagatggtggtgtcctcacagagggcctgcgtgcagatcccccactctcctggcactttccgctgcctgacgcccttgcagctcagctacaagtcggtggactcattcctgcaggcagatggccccagggagcgaccccaggctgccttcccctagtgcacgcacatgtgacaccggctctgacatgctgctgactggacgtttgtcctgatgggccgccagctgcggcctccaagaagctcctgggcgcccccgcccgacccgcacctagggagaactcccaaagctctgtgcctactccggcagagccgcactaacgcgaacccgcgaacccgggccggggcctgggcctgagtggccatactgtgctgctgaagctggcatcgctgccgcccttgtgccaagcactgcgcacgtcctggggcaggagagacgccgctgtgaacacctgccaggccggaaatgccggcttgaagctggcttccaatggaatcgctgccagggaaaccaaccgaggcccgcacaaaatggatttgcaaaagtaatatcccaggcaagactccaggcccctcccagccctgcgcctctccctgctgacggtggggtgcgtccagagtgccagcactcagggtctgaccctggagggtggcaagtgggaggactaaagagagattggtaaaggggggaaaaacggggtgagcaagagggagagaaggttttgtgaaaagacagtggggagaaaagacagtggggaggaaagtttttgggtagatggagcgggaaaagagggtggcgagcaggaggcataaaagacggtggggagaagagtgggggaaaaggttttgggtagatggaggggggaaggtgataagcaggaggtgggaaggagggttgggaaaacgacgatggaaaaatagttttggggtagatggagggtgaaaaaagggtggcatgtgggagagggacgggagtggggaagaagagggtggtgagcaggagcagggagaaggctttgtgaaaagatggcgaggggggaaagacagtgaggaaaaaatgtttttgggtagatggagagggaaaagagggtggagagcagcaggggtcaaaagagagtggtgagtgagggagacaaggttttccgaaaagaccgtgggggaaaatgtttttgggtagttggatggggaaaggagggtgacaagtgggagaaggaaaaagagggtggcgagcgggagggagagaaggttttgcgaaaagacagagggcagaaaagaaagacggtgcagaaagaaaaacggtgggtaaaaagcttttgggtggatggaggggggaaaagaaggtggcaagtgggaggagaaaagagggtggcgagagggaggtaggaaagaggattgggaaaaagacgatggggagaatagttttggggtagatggagggcaaaaagagggtggcaagcaggataggggaaagaagagggcaagcgggaaggggaaagggctttgtgaaaagacggtagtgttgtcttatgtggctttacacatataaaatatgtttctattcctttccttctgaaaatttttaagtagtcacagtaagtctactcgtactataagaaatgaatctggtggggtgcatttgtaatcccagcactttgggaggccaaggcaggtggatcacctgaagtcagaagttcgagaccagcttggccagcatggtaaaatcccatctctactaaaaatacagaaagcagccaggcatggtggtgggcacctgcaatcccagcttcttggaaggcagaggcgggagaatcacttgaacttgccaggcagagattgcagtgaaccgagattgtaccactgcactccagcctgggagacagagcaagactctgtctcaaagaaagaaagagagagagagagagagagaaaggaaggaagaagaaaatgaaaaaagaaagaaatgattctaagttactgtttttaactgctgcagagtattctgtggtaggaacatacaatagttcatgtagttattctcccaatgatggacctttagatcattgccaatatctcactgctaccagcaatgttgctaagataatcttgactatactttcttgcacacacatgcaaatgttttggttttaatagatatgtcagatgccctccaaattggctgcactaatatgcactccctctggtgggacatgagggtacccatttgcccaactccggctaacatttattatcaaagttaaaaatacttgccaatctaatcagtaaaaatagcatctcaatgcccttttatttgtatttccttgataaatggtgagatcgagcatttttttcttagcaattttaatttcctcaaatagtattttcatatgaattgcctatttgcttttcatttgattttttttcttattgcccatttattatgaatactcatttgtttggactttattatctttgtggggttgttttgttttgttttgtttttttgagacagagcctcgccctgtcacccaggctggagtacaatggcatgatctcagctcactgcaacctccgactcccaagttcaagtgattctcctgcctcagcctccaaagtagctgggattacaggtgcccaccaagaagcccggctaatttttgtacttttagtagagacagggtttcaccatgttggccaggctggtcttgaactcctgacctcaagtgatccaccctcctcagcctcccaaagtgctgggattataggcgtgagccaccatgcccggcctatctttgtgttttctattgattatgctgtttctctttttgtccctgttcttgctttctgttgggttgattgaaatttctttgttccatcttatttcctttactggtttgaaatttatacatttcattgctatttttctaataaatactcttaattttttatatccatatataatgttgcctaacaaaatctaaaggtaaacagtacatatagactcttcccaaacaagataaggagtgttcacttcctcccactgttttccttttccccaactctcctgttgatataatccagaattctaattctaaattgttattttaagcatccatggcaatcaatactttagtcttaaataatagcattggctgattacttagagaagtgttacttttttcacactgcttcttcctctggattcatgtcatttcttgcaggaggacttcttaagaagttcttttcaacagaatctgttggtggtaaactttcttaaatcttgaatattcaaggtcaaaatctccttaagctgataggcaacttcagcaaagtctcaggatacaaaatccatgtgcaaaaatcacaagcattcttatatgccaataacagacaaacagagagccaaatcaggagtgaactcccattcacaattacttcaaagagaataaaatacctaggaatccaactgacaagagacatgaaggacctcttcaaggagaactacaaaccactgctcaatgaaataaaaggggatacaaacaaatagaagaacattccatgctcatgggtaggaagaatcaatactgtgaaaatggccatactgcccaaggtaatttatagattcaatgccatccccatgaagctaccaatgactttcttcacagaattggaaaaaactactttaaagttcatatggaaccaaaaaagagcccacattgccaagtcaatcctaagccaaaagaacaaagctggaggcatcacactacctgacttcaaactatactacaaggctacagtaaccaaaacagcatggtactggtaccaaaacagagatatagaccaatggaacagaacacagccctcagaaataatttacaactatctgatctttgacaaacctgacaaaaacaagaaatggggaaaggattccctatttaataaatggtgctgggaaaactggctagccatatggagaaagctgaaactggatcccttccttacaccttatacaaaaattaattcaagatggattaaagacttaaatgttagacctaaaaccataaaaaccctagaagaaaacctaggcaacaccattcaggacataggcatgggcaaggacttcatgtctaaaacaccaaaatcaatggcaacaaaagccaaaattgataaatgggatataattaaactaaagagcttctgcacagcaaaaggaactaccatcagagtgaacaggcaacttacagaatggaagaaaatttttgcagtctactcatctgacaaagggctattatccagaatctacaatgaacttaaacaaatttacaagaaaaaaaaaacaaccccatcaaaagtgggtgaaggatatgaacagacacttctcaaaagaagacatttatgcagccaaaagacacatgaaaaaatgctcatcatcactggccatcagagaaacgcaaatcaaaaccacaatgagatactatctcacaccagttaaaatggtgatcattaaaaagtcaggaaacaacaggtgctggagagaatgtggagaaataggaacagttttacactgttggtgggactgtaaactagttcaaccattgtggaagtcagtgtggcgattcttcagggatctagaactagaaataccatttgacccagccatcccattactgggtatatacccaaaggattataaatcatgctgctataaagacacatgcacacatatgtttattgcagcactattcacaatagcaaagacttggaaccaacccaaatgtccaacagtgatagactggattaagaaaatatggcacatatacaccatggaatactatgcagccataaaaattatgagttcacatcctttgtagggacatggatgaaactggaaaccatcattctcagcaaactatcgcaaggacaaaaaaacaaacaccgcatgttctcactcataggtggtaattgaacaatgagaacacatggacacaggaaggggaacatcacacatcgggtctgttttggggtggggggaagaggggagggatagcattaggagatatacctaacgtaaatgacgagttaatggatgcagcacaccaacatggcacatgtatacatatgtaacaaacctgcacgttgtgcacatgtaccctaaaactcaaagtattaaaaaaaaacacacacatacacacagactatgctcacaaagaccctttgccttacttcagaaaaagaggtagagctactattaagcccctaccctgacaactgggagactagaaatgagcctattataaagaattggcagcagaaaagggactaaagaagaattaatacttttaaaaaaatctcttgaatgtgtgtagtgctattagcactggggcaaaaagcctgatgcactttaagttccaaagtctttaccctgtacaaccttgcataataactaatgtccacaatgatgacactgggccattaagggagactaaattattcttacagtcctatatttaatcaagtaaggaaatatgtaatctaatttggaaatctttaagattcaaaataatgagagttaacattttgtgtgcagctagatatcttatcttgaagacagactttcatttgccacattcttaaacccttgagtgtggtctatagaagtagtcagaagtcatctcccatctggcccaaaattcttctcccattattctttggtttatgccacaaatataagtgcactattcccagataaggactatattcaatatccacagacagcctgttttgccatgacaaaacctggtccctttcagttcagtctcagaacagagtcacattcaagaagcagtttataaggaattcaaatttttacttacatttcccaaatgactgaaaggaattcaaatataaagtccggagtaaccttggtaaaggtgtcatctcgcctttgtccacttccctcacgtactgcatcttctctgggattttcagtaaatgtttttctgctcccctaccaataaggcttttcttccacctgaaatttctccccaatatccacctcctttttttgtctcctttatcttcttagccattcccatttgtcaaaagttaactcctactttagagtttaactcaaatacaataaaatctccttttcaaggaattcttcagtcctatcactgaaactgaattccttctcctactacattacaatgacttctttagttcacatccaagagtaacaggtagacttaaagaaaagataagaacaggctctagagccatcaatcctattttatttgtttagttaccatttattatgccccttctgtatgccacgcatgttgcatgcattttgcatgtgttaactctttaagtctcactgcttgcctatgacataattactataaacctcatgctttaagatatgataactatagtttaaagaaattaagtaccttgccaataatcacatagccaatgagtggcataaccaagtttcaaatccagaaatgctgactccagagctgaggttattaaccagtggggtggccatggaggagtgccactcagacttcctttaagagaacctgccacagtgagcatagttggatctgccacattgttcatactgttacagtaggtaactagtcagacatgagcagggcaggagaaagctcccactactcccacacacaccaaaaatgttacaccactatcacgtgatgatcaggcagttgttagctgtctctctaacataataattgatcacagctggtgccagggaaaggcagactcccaatagatagaaacactgaatctggtgatcagcagcttcccaacaagatctcaggagttgggtgagtgggctcaagcatgtgcattaagaggcaaatggtagagtttaactggtatatgaccttctaggatccttctatcggaaagagaagaacaccttaagtgagcatgcatccaactccaataaacacactgcacatgctcatttcccaagtgctagcaggtcactgcacatgtggacagcccaacccaagagaataatcagtggagaagggacacaagaccccagaagaatgccaacatacaaaactccaagtcaaaaggtcaaaccacacacttgatctctgaagttgcccagttggcccgcttcttacttcctttcattcctgctttaaaacttgcctcggtctctccttctgccttatgcccctccgtcaaattctttcttctgaggaggtgaaaattgaggttgctgctggcccatatggatttgccagtaacaataacaagatcatactttccctgggttaccccccaaaaatgactaagcacagcacaaggacaagagctgagccattcttgcccaacacaagatccctttatcaagcattctttgctgaggaactcctcgccagcctgactaatgctttctcaagactgcactgtagtgtgaggatcttccttttcaatcatgccttcctccatctctcctttcacaaataccatatctgcactgcagtctgaaggttcaccaaactgtttctgctcctttcccctttcccctaaataggtgtttttccattaaatctctagcacgcctgagcccatctcagcttctgctccttgaaagacacaggtggtaccataagtggtccaggaaaacaggtaatataatggggttccaggactggctcactcaccatccatttggcaagaaggactgcatcccaaatagaatatcaagtacagatagtccctggcacaggtgacaggccaactgctgaagttttcattgatgttgacctgggaagatgccctagtcacagttcaatgattcagtgggaacagctcaatgatttgggcatttgaaagatatctgggacctacacatgcaaagacagcagagctggtaaatagttatcaagttattataatgcttcacagggacatcatgtgaaagtgacgatgactggcaaccagctacaagctaagtgaggaaaccacggagcctctttgttaatttatctcttacaataaaaaagaagacatggccaaggagcagattcagaacttaatagttagaaatgcagaactccagagacatttaaatacacagccaaagtaggtcagttatactaaggccaggactctggttaggaaaagatggaaccctagaatatgggatggggatatctgagtggatggccacaaggattttggctctggagactatccagaccttgcagaggtggcccactgcaccacagtaagaaccagcacttcacttatgtggaagacactgcagaagctttaactccacaaggcaacaggtaacttccaaaagacatgctcccatctcctcttcttactcccacaccaccccagtgggtacgattatatccaacataacccagctcaggacacactgggcttcataagagggaaaggattatatatacttcaaaggaatggcaagaattacctaataggtacacacaggagctgggattggattggattgggctttggcttgatcaagaggccaaagcataagattggaaaaagaaggattcatggacttgaagacactttcttgagatgtaggatttaatgctctgggaagggtccctgggcaaggggcaaacttactactgagtgggatactagtttcccattgttgatgtaacacattaccacaaccttaatagcttaacacaacacatattatgtaacttacagttgtggagatcagaagattgaaataggtcttactgggctgaaatgaaggtgttggcaagctgcataccttctggagactctaagggagaatctgtttcttcatcttctttggtgtctagagcctgcttatgttctttggttcatggccccttcatccatcttcaaaatcaagtgtagcatcttcaaatttctcttcctctctaaccatcctacttctgtttttcacttacagggacccttgttgttataatgggatactgggatacacctgaataatacaggataatctcgctatcccaagatccttgatttatccctacctgcaaagttcattttgccatgtaaaataatatgttcacaagttctggggattaggatatagacacctttagggggagggggcattattctgcctacctcaggtaacttttttgaacctgaaaaagcaaaagcccacactgattgaagcagaaatacttagattttcctggaatatggaaaatacctggagactttgaagattattggatatatgatttgagttgatattaactcctggaaatatcatcaaagcatcatcattatcacctgttaaagtggagcttatcgcgtatcaagtaataaatgggaactggctaaagtctggcttactggggccccaccaggtccacaaacccgcctaatgctcactgctattcacctgagccagtgttgttgaacaacagcctccccaaagaaataaaataaaagcccaatgcctggtggtcctctttgtttctagagagagaatattccactcctactggccactgctctggccagtctacaggatgtgatacaagccggcctgccactggggccatatgagcctgcagaaccccgtggtgtgggagggatcggggataggatgagatgcattgcggagtgtatggcaaaccctaaggggatatttacaccacaggcctgtgggtatctagccaggccatatcatccacagtgaagaaacagctcccagctcattacggggccctgctattgatgaaatgcctgacacctgcttctcaaattgtctgaacccacagcccctctgttaaactgaatcacttgttccagcctccctcctcctggagctgagagatagtccaggggaggccaggctagaagcctagctgaggaccaccacacactaacacacgcagcagcccctccacaccaacagtgtacctcacctcaaccctctaccagagtgagctccttccccatcgagtacagggtgtggtgtttaaatgatttcctccaaaaccgagaggggttttctggaggagcttcactctaggagtatatttttccttctaccacgctcctcaactcctaaagcaagtagatctatggcccatttgccctggaatctcaagagctttgctccttgctctcaggtccctggcgcagttgttcactattctcccattctatgccattttacgaaaatccttcctccaagttcaccaccctctcaaggccacagcagcttacaggcagattctgaacatggaggattgcacaatcatcttgaaagtgaacaccatccacagctcacttctagccacagagttctatagcttcccctggaaagagaagaagaataaggaaagatcttctaacttgggaaccctaaagggaagagaggggccaaaaagcctacactagcacctaaattcaaaccaaacatacaattgggatgaaaagatacaattattttcataatgtttcataataagatttctaatccaaagtctaagctttcttcctatctcctcaaactttttcatcccccttttgtaagtccacaatttgaagaattgaagccagggggcaggacaaatgaattctacaacatagggcagacactcaagtttcctctacatacttcataaatcttgtcatctgctttcctagctctgcttcatagttgtctttgtggggttttatagacccataatactttggaataagagaatgaaatatccaggatctcatctggtactcagttcagcccaaagacataagatacactatttcctgttgatatgtggagaaactgagccacagaggcacagagagtgagggacacagccaggattcaaagagcccaccttgtcctgtcccctatcctgaagggaagctctcaaccaactttcagatacaaaggacccaaatagtcatcttaaaaaattagctctgggcaagtgaccttctagagttgcccgttctttaatatttgtttcttactggtaaggtacaaaatctgtgatctcttcaagagagaggctttggaagttgaatcccagataactgagtcataaattctgctttcatggctaagaaacccaaagcttaggagagacctagaggtgacatatcttatccaaattaagaattccttgcagacattctttctctccaagtatccctcaaaacagggccaactttaggagtagtaaatggctgtgtttttgaggagtgacacacaaagaccactcatcacaaacaggatacaatttccaacattcaaaggaacaaatcacttgcttctccaagaacctttaaaatgtctctatccgagggaaatgtcaactgaaaaggggggctcttgtgactctccttatcaagcagatgatcttgacctcaaccacgtgaaaaccaaaatgacctattgagaggccacataattcagtgggaatagcatgagcttagaagtcaggcaggcctgggttttaattctagcactgccgttttctaactatatgctttgtacaggttgcttcaactgtttcaactcctacgacctcctttgtaaaacaggaataacatcacaaggctgtaaggaggtgtagtcagttaacatggctgaagcccctagcacagtatctggcacctgagagaccagtattaggaacacattaaaataaacaggccatgttcaacaaaatgtaagaaacactgaattagacaaacttaaacaggtttcttgccttcagagcttctggaaacctgtgttgtcctaatgtgcatggtaaatcttcaagagagggactattatagcaattcccaaacatattggatcatagatcttttttcatggcactaacataaacactgctgaaaaaaccaatttggagcaaaacctaatagacccttaatggacattaatttcctcctttcttctctcacccagacttctttacctcctaaaactaacatacaaataagacacgttggtctttgtgacttcagcgacatcagaagtgtacgtttgggttttgatattttaaccttaaactctatcatttaaaatagtagttttatgaaaggaaacagccaggcactgtggcttaagcctgtcatcccagctacttcggaggctgaggcaggagaatgacttgagcccaggaatttgaggctacagtgagctatgatgacaccaccgcactccaatctgggcgacagaataagactgcgagacctatttctaaaaaacaaacacccccaacccccaaaaaaggaaaacaaatgatttaacgtgtattgacaagatacttacgaatgactgttatttatactgaatttttaaagatggctttgagaacctctccaaagagctcaatcaaagcactataattaagttcaggcaaattatgagattaaaatatatggccttaaataacaagcaaaacattttccttcattgtcatctggcctacctttacagtctttgcattatttcctgtccgattcagtagatggcactgcagattgaacatagagaaaatcccatagagttgctgtggattcatccttgggtgaatactgatttgttttgttttgttaaccctctctagtttcgatgttgttcatctgccaagaggggaacttgtgtattttgtgggagtgggatggggtaaagtagtgtaagtaatgattttctgcccctactggaaactctccctgtgcctcctaaccccttgaaaattggcatttatagaattccctagctcaagaaggccaaacacaggactatcatttgaccaccgatgtagacccggcccatatcagacagtgctaatcaccaccccaggcccgtgaccagacagtgctgatcaatcacagccacttttccactggagccaaacaacatttctcaattgttttcaatacacttttccaagcaactactataaatcccacaacaaaggcacaacgatgcaatctatttctaatacctgccggagagttcagagttttttcaagagcaaatccttaataatactcaaagttgttaagaaatgtatccaagcttatcagatgatttttgacagaaccaggacaagaattcaggactcttgactctcgcagaagagtttatattccaccctgacttaatgccctactgctaagagtcagactgctgaagtacagcccctgaggaccaagttcagatagccgagtacaaaaggtttgtctggactctggtggccccactcatcatttggagatggggaggggaagaacaggcagaaattaaacccaaaaacagttgatggcgtcctgtactatttgtgcaggccaattttgcgctggcccaagataatcctgctccatggacccagaagggcatagccctccagttgctcctccttcagggctgtccaccttcagttgcaaagaatttttatccattgtttttttataaggcaatcaggtatcaactatgagtcaaatggcaggtcccttcattaatattgcatttccagggacagctttttcagcttctgattttgtggtctaaacgtgttttggggaaaaaaacagggagaagctcttaaactatatcctgtgactttttttccccgaaaactactgatgatgtcagaatgagcattttcagttggtttgggggcatttctagatgaggttcagtcataattttaaatatcatgcatccaaaagtggtattgcctccctcagtctcattcctgattttcttctagcagttgaaactcttaaaggcactgctattctccagtcaactcagatttgaaatctgtcattttgaaatccccccctttcctttaccctgtttccaccaatcatactaattcttgtctgttctgcatctacccccttttttttaatgtcagtgaaatatttcaagccaatacaaaaggtcaaaataataatctaatggacacccacgtactcatcaagttctgtcaaatgtttgcattttgccaaactccgtggtatttttttaataaaagtcatgttgacaattaaaggccttgcaaatccatccctgattccatttatttattgctttagctagcaaatatttatcagtcattactaagtgctaagccctattctaggattggatgcacatcagtaaatgaaagaaagcccctaatttcctggagcttacatggcccagaagttacctccatcccaaatttggtataagtggtttcacacacattttctcatttattccattttatgttccaaaacagtatacactattatcatgcatgttttcaaactttatctaaagagcactttattaacatgtagtacatatgcttcttccacttacctttttgcttcacatgttgataattattttgagagctgtagctccagttcatatatgttaactacagtgttccattgtgtagaacaccattccctgttgaggaacatttaggttattttgcaattttcataaataaaaaacattctgtaatgaataagtccctctccccaggattatatttatatggcctctttcccactcattacacttgccaatgccttgttcctaagaggagttcagccaatatgtgctctcttgaatattcttctagagttgatcagaagtttattagtggaccactctatctttcagagagagtggagattcctctcctatcttcagagaagaatttacataatacaaggataagaaaaaactatccccattactaagagatacggttttattggaagaagtataaataaggttaattggaggaaaatgccctttgtcttctttggcacaaacttccttgagtccagcactcctttattcttcttatcagtatagtagtaatatctgcaatggtctttctcaaccctgactgcccattagaagccctgggaaaactttaaaaagcctgaccctcagtcactcatcataccaatcaattgagaatgtctggagtgggctcaaacattagtacattttttaaagttcctcagatatctgtaacatgcagccaaggttgagaaccatggagctagggcaggagtgatcctcaaattatgggccccagcatgctgctgtgtgctgagctctctgccaaattttggtcaatgtgcacaatttatttgcactcttactaaagatgcatgtagttctcagattcttaaaatgatcaccatttagcattctgtcaccatttgtgtagaatggcttactgcgctgaccatgtacttatgtaaccccaaggctaagtccttccatgttccactaaacttgtgacatttctctggcatcagttgaatgttgtcaatgcctcttacctacagaagattgagtgctctttacccctctacaacatgtcacacaatttttttcttggctcactgttctgacaggtgccattataatagtgtgttccctctctagtagtaaaaatgaattgcacgtatttactgaggtatacggtgttgtccagccccatgttctagaactaatataaggatctttttccatcttgaaacttgttctttatatcagtggttaccttttaatctcttaaaatgtattaccaaaaattcaactattacaaataaatcatgaagcttgaaagattaaaagccacaatctagagggctcatattaggttgtgaacagcaaaagggttcaaggaggctgcttcttctggttttagtgtacattcatgtttctcaaacttaggtctttctaggagttcaatggttatctataagaaatttataatgttgtattttgattccaagcaaagtctaaatatttatataagtgcaggactgttctccaggtggccttggactgaccaagttctcaccttcttatttgtagttcttaagagtaactagaatgtgctgaaagtgcaatatcctgaggaagggaggaattgcatggaatagcccaggccttattcctgtccctcctagggaatgtaacattttgagttaggcaagaactgcctagtacagcttaggctttgttcctctctcccctggaagcaggatgctctttgaagttttgcttagtgagccacattgcccctgaggtatataatccagaagaggctgcctctctgggtccttcagctgtagcacaagtgggacacgtggagttgaggcaccatctgccccaggaaggtttcttgaactttgggggactgtctcacaatgtatcctagacagagtcttgctctgttgcccaggctggagtgcagaggcacgatctcggctcactgcaagctccacctcccgggttcacgccattctcctgcctcagcctcccgagtagctgggactacaggcgccctccaccacgcccagctaattttttgtatttttagtagacatgggttttcaccatgttagccatgatggtctcgatctcctgacctcgtgatccacctgcctcagcctcccaaagtgctgggattacaggtgtgagccaccacacccgggctctaggcttcttttatcactttctgcctgtttgtaggtagtaaatctacttcatttaacttgttgcatatgagtgtgttctgtctcaccagctgcaaacaagttggtaacaagtgcacagtgaacttgctccataataagcacactaggaactatattgagtacttcttatgtgctagggatgctaagggtttaacatgcatatctcattaatcctcacaaggttagataaagtattacattagagttgaagaaaaagcatagaacacttattagctgggcctaaggatgcacagctgataggtgataaggataggactcaaacccaaagtgtgtaactcctaggcccacctttgtaatcactacactatgctattccttaaactatcacagtttactgaagaaagaagtgagatgggcttaaaagtaattgatgccttgtgccacgtgatgatcaactgatgccttggcatctgctcaaatatgaacttcatgatagaacaaacagagaagagtggtgactagaagtgagtcatcaaactcactatagcatagtggcctcaaaaggactcatacaagagaggtcaggaacatagtcacattacaagtgatttaatttctctaatagagcttcatgaaccacatttaataattattatttgattcttactggttcatagttgttcgtgtattcagtgttctttacttatttttatagttgtggaagattgataaataaaatgatttattcttaattttttctacatacttaactaatattttaataagaatttataagaaaatatgggatccatgaggattgtttttccttttaactccagttcatttatcactcaagtttaaggaacattgatgtagacttaaggacaaagatgcaccaaacgtcccaaagttcacagagggtccagtccttgtccccagggcttagggtccaaagcccctgtgtttcttgcccagccttgtgctctctgtttggatctagcaacacaaattatcaaggacagctgactgagcattcaggttttccaggaacctatttcactcccattttcttacctctataactacctaacttgtccatagatctagcccactgatatagtttagattttgtccccacccaaatctcatgtcaaactggaggacgggcctggtggaaagtgactggatcatggggatgaattttcttcttgctgttcttgtgacagtgagttctcacaagttcgatgatttaaatgtgtgtggtaattcccccttctctctttctctctctcctgccaccctgtgaagacagtgcttgcttccgcttcaccttccgccatgattgttaagtttcctgaggccttccagtcatgcttcctgtacagcctgcagaactctgagtcaattaaacctcttttcttcataaattacccagtctcaggtagttctctttagcagtgtgagaacagactaatatacccaccatcacaggtgaccatactttaaatgaacatcctacaagtagaagaaataatttcagagctcagagacaaggcttttgaattaacccaatcaaacaaaaataaagaaaaaagaatgaaaaaaaaatgaacagtctccaagatatatgggattatgtgaaatggcaaaacctaagaatagttggtcttcctgagggagaagagaagatagtaagtgtggaaaacttatgtgagagaataattgaggaaaacttccctggcctggctagagagctagatatccaaatccaagaatcgcagagaattcctgggaaattccgtgcaaaaagatcttcaggctatctaaaggcaaatagtcatcagtctatctaaagtcaatatgaaagaaagaattataagagcagcaggtaacctatagaagaaaacctatcagactaacagcaaacttctcggcagcaaccttacaagccagaaaggattggggtcccagcttcaacctccttaaacagaaaaaactgtcagccaagaattttgtatcccacaaaactaagtttcataaatgaaggagaaatggtcattttccgacaaacaaatgctgagaaaatttgtcactaccaaaccagcactacaagaaatgctaagacatgagttaagctatctaggtaacaacatgatgaagagaacagtagttcacatctcaatattaacattgaatgtcaatggcctaaacactccacttagaagatacagaatagcagaatggattaaaaaaaattacaatccaaatatctgctatcttcaagagactcacttaacacagaaggattcatataaactcaaggaaaaagggtggaaaaaggtattctatgcaaatgaagaccaaaagtgagcacaagtagctattctttttttttttttttttttttttgtagacacattcttgctctgttgccaggctggagtgcagtggcatgatcttggctcactgcaacctccgcctcacgggttcaagcaattctcctgcctcagcctcccaagtagctgggactacaggcgtgtcatgttggccaggatggagctcctgaccttgtgatctacccgcctcagcctcccaaagtgctgggattacaggtgtgatacactgtccccatccagagtagctattcttatatcaaacacaacagacttcaaagcaacaacagtaaaatatatatatataaagatggtcactatacaatgatcaaatgaattgataatcaattcaacaagaagatattataatcctaaatttatatgcaccaaacactggatctcccagattcacaaaacaaatactactacacatgagaaatgagatagatagcaaaataatagtagtgatagacatagcactagacagatctttgagacataaggtcaacagagaaacaacacacttaactggcatgctagaacaaatggacttaacagacatttacaaaacattctacctaagatctgcaaaatataaatttttctcattagcacatgaaacattcttcaagatagaccatatgatatctcacaaaacaagtctcaatcagttttttttaaaattgaaatcatatcaactatcttttcagaccacagtggaataaaattagaaatcaattccaaaagaaaccttcaagactacaaatacatggaaattaaataatctgctactgaatgatatgtgggttaacagtgaaataaagataggaattaaacattctttgaattgaaggataataatgacacaagctatcaaaacctctgggatataacaaaagtgtgctaacaggaaagctgatagcactaaatgccttcatcaaaaagtttgaaagagcacaaattgacaaccgaatgtcacacctcaaggagctggaaaaacaagaacaaactaaacttaaagctagaagaagaaaagaaataacaaagatcagaacagaactaaatgaaattcaaacaaacaaaaagatcagtacaacaaaaagttgattctttgaaaaaacaaacaaaattaataaccattggctagattaacccagagaagaagagagaagatccagataagctcaattagaaatgaaactggagacattacaaccgacaccatagaagtacaaaagatcattgaagactattattgtaactgcccagtgggttcaccttgcccgctgcctagacagagcagatttatcaagatatgggagttgcagtggagaaaaagtaattcatgcagaaccagttgtgcaggagaccagagttttattatgactcaaatcagtctccctgagcattcaggaatcagagtttttaaagattatttggtgggtaggggcttgagaattggggagtgctgactggtctgattggagatgaaatcataaggggtcaaagtgaatttttcttgctgtcttctgttcctgtgtgtgatggcagaactggttgagtattcttgccaaaagaaaaaaaattgacctgaatttaatcaaactgttagatctagctaatatgtaaaggaaacagcaaggatagaagaagaagttaaaatacaccatgaataaacaattggtcagaagaagcaatgggaaaatctactggataaacaacaggatttccttaacaaaaaaaggcatgaaggaagagatcatgagaaatgttatatattaagagtgacataagagacaaaccaaatgctatgtatggaacttgtctgcactctggttaaacaaatccagtgtaaaagacatttttttagataatcatggaaattcgaccacagactgggtattggatgatgttagggggttattgttaactttgtcagacatgagaatgaccctgtagttaagatttttttaagtcgttatctgttagaaaaatataccaaggtatttacagggtaaatactctccagctcaacctccctctccattccagagaatggtgaggagacagatgaaacaacattagcaaaatgttggtaccttctgaagtcggacaatggggtaggtggagtatcatcaaactattccctctagctgcttgtatgtttcaaaatttccatgataaaaggattttttaaggtctcagaatactcaatgacagtctaaggttggaatcacagtggaattctcacgatgcgcctcccatggtagaggcacagcaagagtaatatgtatggaaggggatcctcaggttccccttggcaggcttcatattccccagcaaggaggaaacatgatacttccacaggaccccactacattttctgctaaaaggtggacactgtttaaagaaaataaaaagcccctcaaagattggaagatctctcttcaatagggtctgtaaagcattctctattcataaacgcatttcctgaaatagaacatattcacatatttaaatgtaaagtgaatcacttacagaaaacactgttattactttctgcaatgcctttctacaatctgaatacaactgtcttctgccttaatttaaaactaggcctaccatttttttttttattttttgagacggagtctctctctttcgcccaggcctgactgcagtggcactatctccgctcactgcaagctccgcctcctgggttcacgccattctcctgcctcagcctcttgagtagctgggactacaggcgccggccaccgcgcccggctaatttttttgtagttttagtagagacggggtttcaccgtgttagccaggatggtctcgatctcctgacctcatgatccacccgcctcggcctcccaaagtgctgggattacaggcgtgaaccaccgcgcctggcctaggcctaccatatttttaaaagtacagcacaattcctttctggttttgcctccatgtaaacagaaagaaggactatacactgacatttcccctatttgctgcagagcttatagtacttgcataataaattagagaggaaaaagaccaactcagttcaactgcaactgagaagaaacatgcatagtgatacttatcctgattctgtcaacttgtaaatatgtataatagatattcagacttacccacaacccataaaagatgaatttccaaaattgcagaatatttattctctgtaaaattttagttagagctgcatcccagatgattcatttggcatttaatggtatgtaaattagttttggaatttactacagtctttgacaatgatagatgacattcacaggcaaccaatgatagacaagatcacttgccataaaatgactatgttatccaggaaagtaaagaagagacataattactggcccgctaaactggaaggcacccaagaatctcttttagtaggtgactaaaggggaagacatttaactattgaccagtgtatttatttccaaagcctgccatagcaaagtaacacagatggggtggcctaaacaacagaattgtctcatgattctggaggctagaagtttgagaccaaagtgtcaacagtgctggttccttctgagggctataaaaaagaatctgttccatgtcagcctccttgcttctggtgattgctggcaatctttggcaatcatttgcttgtagaggcatcactttgatctctgccttcctgttcacatttcattcttcctgtatgtgtctctccatgtgacattcttttttataaaaacaccagtcatattggattacggacccactttactccagtatgatgtcatcttaattaatcacatctgcaatgattttatttccaaataaggttgcattctgagatactgagggttaggtcttcaacatatcattttggggatacacatttcaacccataacaactcagagagtcaaaaaaacaaagaggccaccataccaatttccacaggtcaactagtaaagacctgctttctgattgtatgcaaatatgttgacatttgtcctaaccacagtagaaaaagtatataaatggtagccttcatagggctgtaacaggtatgctatttagaatccaggttccagatgctttaacaatgagatgatacagtgaaaaatgagatagaagtttattttcctttcagttaatcatctgagaataagcactttagggatgatttaacagcactgaactattaaggaccctgggatcctttatattattgccatcttcaacatgaagtttccatctctgggcttttgccatcatgtttgccacacacctattaagaaggaaattagggcaagggagttgtatttgtccattcttgcattgctataaagaaatacctgggcagggtgtggtggctcacacctgtaatcccaacactttaggaggcccaggagggtggatcatctgatgtcaggaggttgaggccagcctgaccaatatggtaaaaccccatctctactaaaaaaaatacaaaaattagccaggcatggtggtgtgcacctgtagctccagctacttgggaggctgagatagaagaattgcctgaacctgggaggcagaggttgcagtgagccaagatcatgccattacattccagcctgggcaacaagagcaaaattccatctcataaataaataaataaatacctgagactgggtaacttaaaaagaaaagaagtctaattggctctcagttctgcaggctgtacagaaagcatcgtgctacatctgcttgcttgacttctggggaggcctccaataacttacaaccatggctgaaggcaaaggggagcaagatatctcacatgatgggagcaggagcaagagagagcgtgagtggggaggtgctagacacttttaaacaaccatatctctccagaattcactatcatgagaacagtgcctagagaatggtgctaaaccattcatgagaaactgcccccatgatccaatcacctcccaccaggccccacctccaacactggggattacaattcatcatgagatttggtggggacacagatccaaaccatatcaggagtgtatgcccattacttttgagagtacaagaggaaagtagaacacatcacttctctcatctcattgaacagaacttagctatatggctacaaccggcttctagaggtagccctgggctatacaaaggctgggaaatacagtcctaatccatgaccagttaaaactatcactgtggaagaatgggagagcagattgtggtgtggagtctaatggtctctttcacagccagtcaacctaataaaactccgcaactccttataatccccttccactcttatgaaattgctgtcaagtttcaaaggcttaattcagtccttatcccttgaagcttctctacaatgtttgatataattgacctgcttggagttctttcttcctgatatagtttggctctgtgtccccagccaaatctcaccttgtaacccccataaatcccacgtgttgtgggagggacccagtgaaagataattgaatcatggggtccagtctttcccacgctgttctcatgttagtgaataagtctcacaagatctgatggttttaaaaatgggagtttccctgcacaagctctctctctttgcctgctgccatccacataagatgtgacttgctcctccctgccttctgccatgattatgaggcttccccagccacgtggaactgtaagtccattaaacctctttcttttgtaaattgcccagtcttgggtatgtctttatcagcatcgtgaaaacggactaatacactgccccttctcctaattcttctaattgtttcttcttagtaatattactttctggccctgcttctgttcatcttccttaaagtaagtggttccaaaaggcctgtcatccgaatctcttttctctttcttatatgccctcccttttgcaaagtcatcaactttcttgatttcaaccatcagtttgaagtttgatgcttcccatatatctgatctgttgccctactttctctccagtgtctctactccacatttcccactgtgtgctggactttgctatatcttgtcaaagtctcagacatccaaaactagatttaccatcatctctctgaaatctgtttccttttaccttggctcttgtttatagcattactataacccaaatgttatagagtttgggttgttgtaactgtcttctccctaccttatccagtcaatgagtatattgtgtccattgtaactctggagttttatacacccacacctttctgacctgttcctaaagccattgttcttgttcttgttctgacttcattacctcttagtctagaccattctactaatttctctcctcattctaactcttcctacactaatatcggggatgccaaagcacaactttgaaaaagatcagggaaagcatagtcattgtggctgaccatgataccagtctcaatggtagaactttttagttcctacaattttccagatacttacatgcaatatctcatataatactcagtaacacctaactaaattaacagctaagtaaattaagtgcatacatacaccaggcactgtgccaagaactgtaccttattttaatctcacaacctaaaaaggtaagtactattattgttctctttttgtatactaagcaactgagaggaagaaacaaaggctttacaaaactgagtaatttactcacggtctgatattggttaaatggtgaaactaggatttgaaccagttagtttccaaaataccctctcataaacattaacttaacctcatagcaatgatagaaggtcattattactattattatttcataaaccaaggaaattaagtaatcttaaattgacaagacttcaaagcccaagttctttcttttcttttcttttttcttttttattattgtactttaagttctaagatacatgtgcacaatgtgcaagtttattacatatgtatacatgtgccatgtttgtgtgctgcacccattaactcctcatttacattgggtatatctcctaatgctttccctcccccctctccccaccccacaacaggccgaggtgtgtgatgttccccttcctgtgtccaagtgttctcattgttcaattcccacctatgagtgagaacatgtggtgtctggttttttgttcttgcgatagtttgctgaaaatcatggtttccagcttcatccatgtccctacaaaggacatgaactcatcattttttatggcagcatagtattccatggtgtatatgtgccacattttgttaatccagtctatcattgttggacatttgggttgattccaagtctctgctattgtgaatagtgctgcaataaacacatgtgtgcatgtgcctttatagcagcatgatttataatcctttgggtatatacccagtaatgggattgctgggtcaaatggtatttctagttctagatccttgaggagtctccacactgtcttccacaatggttgaattagtttacagtcccaccaacagtgtaaaagtgttcctatttctccacatcctctccagcacctgttgtttcctgactttttaatgatctccattctaactggtgtgagatggtatctcattgtggttttgatttgcatttctctgatggtcagtgatgacgagcattttttcatgtgtcttttgactgcgtaaatgtcttcttttgagaagtgtctgttcatatccttcgcccacttgttgatgggttttttttttcttgtaaatttgtttgagttctttgtagattctggatattagccctttgtcagatgagtagattgcaaaaattttctcccattctgtaggtcgcctgttcactctgatggtagtttcttttgctgtacagaagctctttggtttaattggatcccatttgtcacttttggcttttgttgccattgcttttggtgttttagccatgaagtccttgcccacgcctatgtcctgaatggtatttcctaggttttcttctagggtttttatgattttaggtctaatatttaagtctttttaatccatcttgaattaatttttgtataaggtgtaaggaagggatccagtttcaactttctccatatagctagcctgttttcccagcaccatttattaaatagggaatcctttccccatttcttgtttttgtcaggtttgtcaaatatcagatggttgtagatgtgtggtattatttctgagggctctgttctgttccattggtctatatctctgttttggtaccagtaccatgctgttttggttactgtagctttgtagtatagtttgaagtcaggtagtgtgatgcctccaggtttgttcttttggcttaggattgtcctcacaatgtgggctcttttctagttccacttgaactttaaagtagttttttccaattctgtgaagaaagtcattggtagcttcatggggatggcattgaatctataaattaccttgggcagtatggccattttcacgatattgattcttcctacccatgagcatggaatgttcttctatttgtttgtatcctcttttatttcattgagcagtggtttgtagttctccttgaagaggtccttcacatcccttgtaagttggattcctaggtattttattctctttgaagtaattgtgaatgggagttcactcctgatttggctctctgtttgtctgttattggtgtataagaatgcttgtgatttttgcacattgattttgtatcctgagactttgctgaagttgcctatcagcttaaggagattttgggctgagacgatggggttttctagatataaaatcatgtcatctgcaaacagggacaatttgacttcctcttgtcctaattgaataccctttatttccttctcctgcctgattgccctggccagaacttccaacactatgttgaataggagtggtgagagaggacatccctgtcttgtgccagttttcaaagggaatgcttccagtttttgcccattcattatgatattagctgtgggtttgtcatagatagctcttattattttgagatacatcccatcaatacctaatatattgagagtttttagcatgaagggttgttgaattttgtcaaaggccttttctgcatctgttgagataatcatgtggtttttgtcagtagttctgtttatatgctggattacgcttattgatttgcatatgttgaaccagccttgcatcccagggatgaatcccacttgatcatggtggagaagctttttgatgtgctgctggatttggtttgccagtattttattgaggatttttacatcgatgttcatcaaggatattggtcaaaaattctctttttttgttgtgtctctgccaggctttggtatcaggatgatgctggcctcataaaatgagttagggaggattccctctttttctatttattggaatagtttcagaaggaatggtaccagctcctccttgtacctctggtagaattcggctgtgaatccgtcttgtcctgaactttttttggttggtaagctattaatttttgcctcaatttcagagcctgttattggtctattcagggattcaacttcttccaggtttagtcttgggagagtgtatgtgtctaagaatttatccatttcttctagattttctagtttatttgcatagaggtgtttgtagtattctctgatggtagtttgtacttctttgggattggtggtgatatcccctttatcatttttttatagcatctagttgattcttctctcttttcttctttattagtcttgctagtgatctatcaattttgttgatcttttcagaaaaccagctcctgaattcgttgattttttgaagggttttttgtgtctctatttccttcagctctgctctgatcttatttatttcttgccttctgttagcttttgaatgtgtttgctcttgcttctccagttcttttaattgtgatgtcagggtgtcaattttagatctttcctgctttctcttgagggcatttagtgctataaatttcaaaacagctcaactacatggaaactgaacaacctgctcctgaatgactactgggtacataacaaaatgaaggcagaaataaagacattctttgaaaccaatgagaacaaagacacaacataccagaatctctgggacacatttaaagcagtgtgtagagttctttcttttctttatacaacttcctatttatgttcctcagttataaatgaagttccagtccctgtgagatttcttgcattcgtggattattgacattaagagaaactgagaagagacaggcaacaagtcagcacaatacagtccacagtgtaggaaagccttccagaggttgtattcttctcatgatagtggaatcaactttataaaatcacagatactagtttcttgaaattccacttaagggtgtctttctccatgttatcatcactgtcccttggccatttaggggatgtggttggactttgtcctaagcttgcaattgctggattattaagttcttttgtccttttagcttattttggtctggaaaaaaagggtaaatcttttatactgaatatgaaaaatacaatgagacagagaaaatgatcaagtcaatgtttccagatacctgatttcagacagggatagtagatcttctattctcctctagctagtattgaccccatacccctaggcttctaatttttcattatggtaaaaaaatccagaaataggactaaccgaagctgggtccctgataacttggcagtatgcaggccaagatgctttgaattttatgtgggtggctcaaatttttagtattcacaagtatttatgaactcgtaaggctggaactctgaaccctatctaaagggagagaatggtcttcattggctatacttgccattttagcaggtacaacaaacaaacaaacaaaaaacaaaagaaatcatagatttggaaatatgaaattgacataagcaaaagaagtctcttaataaattcaattccatgggtttgtctatggacagggttatagccctgaagacagaaggatgacactaagtggtactggaaactgggagtcaaggtaagtttttggttatagaaagtgtattttattattagagcaaatggcaaatacattcaaggacattgatgttataggggaagagtctcaagggggaaaaatgctaatacaagtataaaaccaaattgctatttatgaaggtaaagtttggtgctgcctcactgtcaactctttccttatactctaactatagtcttgataaagtactcaatattccctctacatggaatagtctatttgcccagtacacaaacacaaacacacactaatacacacatacatgcacacaccattgcctttcttctagctaatttctacatatcttttaagtcttagcttatatgttatttcttccaggaaacttactgaaacatccccaagaccatattaggtgccctctctaattccctgaacaataacaatatgggtcactctgtacagtaattacctgttcatccgtttgctttgttcgttaaacgctaagttccttttggcagggaatagctttgccttcattattgtttcattcttaggatttagcataatttctgccataaagtatataggtgcttgatataaatctgttaaaggaacgtatacattttgcaatacagaaagcaatttttttcgtcattattccaatgtgtgttcttttccaaaatatattttctagagtaaaacgagttctaattatttcaaagagcagttaatttggatatgcagatattattgcttgcccactgtggtaacctttagggctgcttgcaaatatcctggttctgtcacctgcccagtgaaaaatgcacagtaatgtggaagcttcacgaactattgcatgattctccctgtcccttccccctaatcatggaagcacctgttcctgttccctcacaatggaagaatgtttagaatggaagtctctgtcagcctgtgaactcaaatgagatgtggaacagatccttcagctaaccccaatggacaggtcatgagatcaagaaataaatctctaatgttgtagcataactaatctgtcttgactaacataattttatgacagctacttcggctatctcttctttcttactatcagaacttgcctcactctctagaagcacaaaatactaaatattcttttttccagcttcccttgcaggtaagagtagctgtgtggcacagttctgaacaaagaaatagaaggaaaattcaacttgtgttcttactattttccaccttctaaaaggggattataaagagaactctctcctcccattttgctgctgcattcaattatatgtagacttgaggtagcgatcttttagctaagaggataagcctaagaattaagtcaatatattaagagccactgagtggctgcaccaaacctgaatttatcacttcaagacttactgctatgtgaggttataaatgtctttagtgtttggatggatgttgatcaggaatattttctgagttacagctgaatgcatactaacaaattgcataaggaatgtgcaaatttccctctccgataccctatcactctaaaattttggaagccaatataaaccagcaagtcaggttggatacccaggaagcaagagcatcatttggaagaactaaacacatgagaagttcatctagtgatgaaaccttttggctaaagatagaatccatgcgctaatcttagaaaaagacagtaagcttgcttacattggaggagaagcataagagggcacattagaaaaggacattcataagtaaattcattcttggtctttttgttcagaattagcgcatgaaacaatttcatagttagctacctgcctaggaaatttttttgcccaactagtaaaaaagagaaagaaaataaaagaaatgccaaccatacatgtgttttaccagcagtacatcttcagaagttagaaaggaactgataaagaagtggttcccttgtgcttcagtggttatttacaagtcatttgtatcactttccaacctaacttacatgtaatctaccaccttttgttccacctctttttttaaaaaagtgttcgtttgtctacattacctttcattagacaatacttttatgagtgtaattcttaatttattattaaataatccattgaatattgacaattttacacagtactcatcaaaaaatctagacctggaaaagagattattcagtgcttttcaaagaagtcaaaaaatccttaaaaccagagtaggcagggtacagcaaataaaatgcagacattttaacatgagaaacaaaatctccaaaattgttctcctacctacccaatctgccatattccactttttccaccaatttcaggagtttctgccacatggtttggctccagtgagccagtccctgcagcatccacagacatgaattggatctgtgtttttatatcaacagataagttcaattacttcatgatattcttttatgcacaggtaaagaactgatattgataatccaggaatttggttttgtttttacacatgaactgcgaacatagaactgcatgccctagaagaaatgacagctggtgagaaaataggtttctgtgcgttatctggagccaagagtgctaggtgcagaaggatcagtagatgatacagtggccaccttggtacagttgccagtgagctatcaggaatcacaagtagatttgaggaaagcttcaatagaaggaatagaggtagtggaaactgattcatgaacccttctgagtaataacaaatactttaaaaaaccatatcatgagttctaatataattttcttgtctggaatcagctactttcaggatcacttgttcttttaggcttctgaacttttacactgaagactgtggcgtcattagaaaaaagatcacaacacttggaatccctgattacctaatcctccagcagttaatgcccaaggaaacagcctctaggataccaattcatcaaaaagtgttccaggttcattctaattcaataaattatgttgagattaagttatacataatagatgttaatactaccattatgaatattgttattattttcaaacctcaaagtttatttttaaaatacagattgatttttttccctaaaatgctaaagcttttacatacatacaaaagtatgacctggggtttggaaatttgctttgcagtctgggagcttgtagttaacttaaagaattttaaatgcaattagtactttcagacaatcgatgtcagactgtcatatcttattctttggggtatgaagcaaggtattttacaatgcccaaaaataactttcaaaatagtatttagcaaactgtctggagcctctttccccccaaattagagtatccaacacagatgatacacaagatataacttgaagattactgattttttaaatgcctccccagaatttacatattaaatcgattattttctccttcataatagttaccttttgacacttacacattcaccccaagtacaaattcactaattatcaaggcctaggcactattataattctgggcatataaatcttaaatattctatgattgaatgggtccatgagtgagtgagtgagcaaatggtaaaagaacagataaattaatttagaacctctgctttgaggagtgctttcccagccagtaatatttttaatatctacgctaatggcaaaactttctggtttggggtgaatttgattaatgaaaagactcaaaaaatcatttggaataagtcttgggagtaagagacacaatccagtgggataaggacacttaggaaaacacaaggcatgatcaaaatattggaagtctgactttctcataattgtgtcctgaaggcaattccagaaatgatttgagcatccacagcggctctgaactaggcatgttaactccagaatgactgcttagaaagactatgttattttgaatgaaggaaaactgacatgctgattttctgtttctctaattaggctcatacattcatggtcaaggtttatatcatattttgtaaatgtgattagaagaaaagaccatttttcttatatgtaagatgaagggtaagactagatgatttctataaattttcccagtactaatattcagtaattctatatataaataaataatttaaacattgttcacattagtgagccattctcactaatatttcagaggttttatattgaagggactctcctttaaacaaccccaagacttcaagggaaatcatgctttaggctgtagaccacaagatatatggctgctggagcaagatatacgggacaaacctctctctctctctctctctctctctctctctctctctctctctctctctctctcacacacacacacacacacacacacacacacccctccaccccattagcagtaaactatctgtccccaaacagggacgattatagaagtcaacatggtagttcactagttcacattcatttgaaatcacttatataatgtgtagagagtaaagctgttctttaaatgatctatcaacttttcactaaatagttacaacttcaaaagccggggaagtgccttcaaatgaaagtatgacagcaggcttcagaatgtcctgcttccgattgtgtccaaaatatcttattctgtagattccaggctgggcagtgtctggaatatgccattccactgttgcattactcagacccaggagtcccttgtgccaataaaaactgttgataaaaaacaaacaagcaagcaaaactcaattttactcttaaaaatgtttaattagaaaaatacatgattattcatttaatgaatattcagagaatacctacaatgagcaaggcactatcaagacattgaagatacagcaatgaacaaaacagacaaaaacgtctattttctagaagagaaactttaaagaacagcaatttgtagaaatagctttacttgttctacctttctacctacctaaattatactcaccccaggaaaccttacctgatagccacaagatgtctctcctgctgtagaattgcaaagcactcttttagcccttatctgacacttattttcacatctagattcatttgttttctatatatatatatgtgtgtgtgtatacatatatatatgtatatatatatatagaaaatgaatacatgtcagactctcttctagaagtactgagggtacagtaaggagcaagatagatatggtcccaagtttcatgaagcttatgttctactgagttgaagatggaaataaatgcaataaacaaaaagcaataaatataaaaatcttaagaatgacaagtttagtgtagaaaacaagatggaagttttttagggagatgtcatttaaactgagtctgcagaaatctggaggaaaaaacattctaacaagaaggaacagaaaatacaaagtgtccaaagcaggaacaaacttgatgtggccacaaagcagaaagcaggtcagttggtacagggaatggtaaaccatggaagagtgcttgagatgagagaaacaggtggaaccagatcatgttggcccctgcagatcacagcagagagttcagacactcttctagactcagtgagatacaacgggctaactgatatcctcagttatgctgaaagtaaatctcttgggcacagagagtgtgctcgacattctgtgtttctcagtgatgggttcagtactctcaacaaatatttgattattctgctgctaatgaacaaggcagagatctaaacatatcctcagtattgactgctattagctaaaaactttgagcatttaaatataaatcattctttttattacctgtataaccttttcaacgataaatatacattacttgttttaaaatgtacctatactctacagctctaaataccaaagaaaaattttgcccatatttgtatatgggccatggtcaaattcctattttcaattaaccatctgaaccatactaacatatttacatttaacaaactaatatcacttagtttgaggcaatctgaattagacccaaattgccaaaaactgtacctacttccatgccactgtcatggaatgttaaatttatagacttgggaacagaagtattgtcttatttcagacacattatcaaatcttcaaaatatctattcagctcaggaatttggtagcaaaaggcaaagagatatgtctctctggagaaattgcctgaatatattatctcctcactcaagtcattaagagttaaacacccaagcttctagtgttttagtaactcaaatgaagaatcattgatcatatacaaacatgcaatacatgtcaggtatagactcattttccctatagaaatatcaagctctacagagacatctcaacacttttactctatactcctttcaaccaatttgcaaggaagctagttagattttacaaataatacctgtgtccatggggaaaaaaaacagaacagatgtctgtaagaatggaagccataacctcattagcacctaatcttacagaagcacacaccacactgttttgcagaaaaatgaatcaaaatgaaatctaataaatcaactaaatatgtccagaaacctccttgggaatttgatatcattaataccttgtactgagccagtcttttcatttgtcttcccagcattacaagccaactggtttcaaagcttgaaagacaaaaatattcaataaatgtgctcaccgagtctcccaggaggcatcattacacactatctgccacgatgttgaagtagcctcatatttctccacagtgaggaaggtctgatggttctgaaatgcaattaataaacctgatcaggtactgcacagtcacagaaggaacctgtttgtaaatactccccttgttgaccatatgttagcctaccaataccttgtgtgaaaatgtgttagaatttcatccaaattcttaggctttcctcttaacattctatgcaatgtactcagaatgttaatttatccagtctattaaaaaacatgatttttttagaaatgtgaaagaagtgtaattttagagttagtagcaaattttggaaattagggcagaaaagaggctgggaataaaacttacctgagattttaaaaaggtataagtcaagccttttcatgatatgtttattgatctatatatcccaagactttctctagtcacctcaaaagttagaagggaaaatggtaaagtttagtctactttccatctccaggtgaatgaattattagttaacgtacctccctgagtgaaagaattgaaaagaatacataaatcttccctatcctggggtactaaaggaggtctttagattttttataatagatttctagaaaccacatcataaaaagattttatttccccattggaagattattataatagaagaatttgtttcagaccaagaattcagcttcaaacaaagcacagatttgaatgatatgacaagttaataaagacaaaggctatacatttctagtatccttttaaatccttgagattgtgaccctaaaaggtacatgtctaattcacttatatttatcacagttctttacatctgtcatttactggtgctcaaataaccccttgctaaatgtatcacctatttacatgtgggccatgtaattgtttaaaattcttctttaagtattcaactgatgaattacattcaataaggaagttttcataaccataggaacctgtaaagagagttatttctgtctatttatggcaaatgacattgggaaggccttagatggagaagatatggtgggctttttgaatatgtctagagtagagactgaagaacaagtctaggcctctgaataccagggataaaacatatgacaatcttttcccaactgctctaccgtaatctcttccagatgcataattaggtactgcatacattaattatgcataatataagttactttatctctctaggcctcaatttattcatctggaaaataggggtaataaaacttaactcattgagtagtcataaggatggaattaatcatgtgataatgcatataaagcactttaataggaatacttgcaaatactacctgcaaaatagtaagcattccataaatagtgatgataactactaatgaagaagggtgatagaaattgttttataccaagtcccaaagcattctttgaaattaattctattaccactatagtagtttaaaggttttgttctcctgcttctccatggcaataatgatgatagaatttctctaccctagggatatcaggtgacagctaaacatgcagttttgatataacactttgatatcttcagaaaataatgttataaacatgtaactattgtggcacagattcacttactaaagaaattacttcaaacaggtgcatattgactacctaagaagtagaagactttcctccaatgtcatatttgagaatgtcatattgccacaattgctatcttggcaataatgacattttaaaaacaggaatgggaaggttcttttggaaggaaggtatttttggattataagtgactataggccctgggaagaacagctaattgatataaggaatgcatcctcagccacagtgaaaaccatgacctcgaaatcacagtcatatgcccactctttttccactataaattcctttattatttgaggttttacaactagaatgtgtccagttactgcttgtgtagttataagtatattttaaggaagttatagaagtatacattaattttattaatagatatattacatatgtatatagtttatcatacatatgataaaaacaaaaaagtctgaaatgctttattaaaaaactcttaacagctattacctctggaaagcaggtttgtgggtagaagagcacttatatattctattttctacacttctatattgttttaacattgggcatgtattttgaatgtcattttttaggtttaataaataaatgctctattagcaccagtagtaaataatagggaaatggccgatgcaagataaagtaaagcacatgcaccaggactccaagccaggagagtatacacccggggatctgtgaccgttccacaacagtacaggtaggaccagagatagtagtgtagaggaggaggagagagccaaaaagagaagaagaagccaaagacacacatccttcagttggccctttgactatttcacaacatttggtagagttctatatatttgaatacagtcatatatcggatacatcctgagaagtgcattgttaggcaaattcatcattgtatgagcatcacagacttagacttacacaaacttagatggtgtaacctcctacacacctaggctatatggtacagcccgtggctcctaggctacaaatttgtacagcccgttactgtattgaatgttgtaggcaattgtaacacaatggtaagtatttgtgtatctaaacatacctaaacatagaaaaggtacagtaaaagtagagtattataatctcatgggaccaatgtcataaatgcagttcatctttgactgaaacatcattgtatgtggcgcgtaattatatatatgggattgtattcaacttaacatcttcttgacagacaatgcagtcatacatgcattatgctatacttggtcctaagtgaagccaattatgtttcctgtgtgcttttacccagactcaatccacattaactacctattgaatattttcccgtacctacaaaataagatggaaaacaagttggaacattttgtctttatgttattaacctctagagggatatttaaatgaatgaatggctaaaaagtggatttacatttgtaaaagaaaatcattgatacctacctggttttgtactgaattcttcgggttagcacctacaaatataacttcagcaacttccccctgaaagtaaaaattcatttaatgacttctaataaaaggttttttgctatactcatattttggacattatttattataaattctataatttagggtgcctttatagattttgttctatttaatcaagtaagttatcttctaagaatattaacccttgcaacaatagacataggaatgtttggccaatgagtttgcttttggtggactcagatacaagtgaagatctagagctgtagtttatattagtgacagcatattaaaatggcttcttcaggccttgataattcctcacacctccctcccaacacaaatacagggaatatttgaatcaaattagaacagtcaaaactttccacagatgactcatatttatgcttacatttatagttaagcttttatttttataagagatggagtggcaggatgtgtatttatcctcccccctgaaacgactaaaaaactggaaaaaatatatattaaacaatggattttcaagtgacaaagaaagacagtgatatttgagtggcagcagacaaacaagaaccctgtaatccaccagctcaatgtcatcagagtttacgggccacggcagaaggaggagaattcaggccaagtctggcagtctaagttgaggatatggagctgggtgtccacaaaagccaaacagtcttgagtttatagcacagagcatcatagagaggatagctgcacagagacagaaatctggagatttgcagaaagctcccctcaagtttgcatgcatataagggaactactggaagccaggaaaagaatgggctaacagaattacagagaacagtccccaggctcatagagagttgtgacaagattctgttcccaccaggccagactggaaaacctcataattcaaaagaattttacattagtgtgtgaggggatgaggggtgctgggggaagtgaggaagggatttgctcaagatgaaaatctgctctggtcctgcctaaaaaatttagtaataggtaatgcaataggtaaaagcaataaaactaaatgctagttctttgaggacacaaattaccaaaattagaaagaaagaggggatatcattgtcaactcttcagaaattaaaaggattacaggggattatcatgagcaacaacaacttttatattacaccaacaaattaaacaacttatatgaaatgagaaaattcctagaatgataccaattcctataaagataaattcctagaaagacacaaaattgatgcaaggaaaaaaataggacatatgaatggtcatataacaagtaaagaaattgaattagtaataaaaattttgccataaagaaaagccaggtccatatggccttgctggtcaatccaatcaaatatttaaagagtaaataatgccaatcttttggatactttttcagaaagtacaagagaaaacatttcccaactcattctttgaaagcactattgccccaataccaaaggcaaagacaacacataaaaagaaaactaaaaatatccctcatggacatgagtagaaaactctacaatatatcagcaaatcaaattcagcaacatctaaaaaggattatacaccatgactaaatgatacggcatttatttaacatctgaaaaccaatgaatgtaaataccttattaaaataacaaaagacaaaaccacattgtcacctcagtagaaaaaaaattgcaaaactccaacactgatttctgacaaaaacttgcaataagctaggcataaaacatgaaaaagagaatctacaaaaaatcctaaagaaaacatcatactaaatggtgaaaaactgaatacttttctactacgattggaaacaagacaagagtgtccagtctcacaacttctatttgacattggattggatcttcagcaaaaaaaacaaagatgaaggtaccacacaacctgacttcaaaatatactacaaagctatagtaatcaacacagcatggtactggcctaaagtaatcaacacaccattggtacacatagaccaatggagcccagaaataagccctcacatttatgataaattgatttttgacaaaggtgccaagaatgcacaatggggaagtgacagtctcttcaataaatgctgctgggaaaactggatatccacatgcagaagaaggaaatataaaaattaactcaaaattgattaaagatttaaatataaaacctgaaactataaaacaactgaaagaaaacctagaggaaaagctccatgatgttggtgtaggcgatgtttttttttttttaatatgacccctaatgcaaaagcaacaaaagcaaaaacagacacatattacatcaaactaaacagtttctgcacaaccaaaaaaacaattaacaaagtgaggagacaacctaaagaatgggagaaaacacttgcaaactatgcatccaataaagagttaatatccaaaagatataaggtactcaaacaactctatagcaagaaaacaaatgacccaacttgaaaataagaaaaggacctgaataaacatttctctaaagaagacatacaaatgctcaacagggtatttttttaaatgttcaatatcagtgatcatcgaagaaatgcaaattaaaactacaacaagatatcacctaatacctgttagaatgtataatatttaaaaagacaaaagacaagtgttgataagaatgtagaaaaaggtaactcttgcacactgttcatgacaatgtgaattagtgcagccattatgaaaagcagcaagaggtttctcaaaaaattaaaaatagaactactgtaaaatatatacacaataccatttctgggtatatagagaaaggaaatgaaatcagtttgttgaagagatatgtgaactcccatgtttattgcagcactgttcacaatagccaagatatgaaacaacctaagtgttcatcaatggatgaatggataaagaaaatgtagtacatatacacaatggaatactattcagtcataaataagaatgagatccttacatttgatacaacatggataaacctggagaacattagattcagtaaaataagccaggtacagaaagataaataccacatgatctcacttatatatagaaccttcaagagttaaactcatagaagtagagagtagaatgttggcagaaggttagttaccaggggctaggaggttagggggttggggaggtattgatcaaagaatataaaatttcatttagacagagggaataagttcaagagggctactgtacaacttgatggcttcagttaaaaacaacatattgtgttttaaaaattgttaagaaagtctcaaattttctcacaacaaaaaataatatgtgacataatgtatatgttaattagctcaattgagccattccccatgtatacatatttcaaaacatcatcttgtacacagtaaatatatataatttttatttatcaagtagaaaattaaataaaattttttaaaaagcagaacattctattgaaggttctagccagtccgataaggataaataattaggtgcatttagaaaagaaatatagaaaggaataaataagcttatttttattcacagatgacatgatactatatgtagaaattcctaaggaatccagactcccctcttactcatccctcctccccccagaaaaactgttgaaactaataactgattcagcaagctttcaggacacaagattgatataaaatagtaatggtacaaattctgcttcatttctgtatgtttttcctatccttgacttaagagacaactctcagtgccagtgaatagttccatgatcattcacttaagaaaaggaataatttggattttagaatttcaatttgacacaattacttacaaaaaataaatatttccccattctcattacttttgcagagataagaacaattgtcaaaattatcattgctaacagttggtctacagcatgattagaggcaaatggtgacacaaagtgacatcccccaaaacatccctctaaaggattccaaggtctgctcatgagtcttaccactctgtattcaggttttgctggctgcaggacatccccgaaagttctgccttttggtgctctatccacaatactaggaattaatggaactattaattgtttgaaaaagggaggttctggacctctgctcaggttggctaccgtgtcctggaacagagagcatttgttaaggagtgcacaggtagagtcaaagaccctttccccaggcctccagacccagaaatgcctgcattaatggaagagtgcacacacacatatacatactccaagagctaacaaccttgagcaaaataggaaggtagccttgctaagcatgagcctagaaattcataatttaaactcttgtcactgggagaaagttttggtcataggcaactctttcattcccctagacaacataaggacagtgaccagagtacaaggttggaagcatactttcaaattgtctgactttgtacaggggcctaacatgcaaaaaggtaattataccatgacagtgtaattattattttaatttttaaaaagtattgagccactctcacctggagtgagtaccaagttttttcctagattcttgtctgtgctaataaaagaatataataaatatatttttaatttaaaatttaagatcatcccacatcctgactggtttaatctatattgcccacaaagtttaccatttttaatagtgtcataaaaatacaaatctcaattttcaaatatccctatatctatattaggttggtacaaaagtaattggcattttgccattactttcaatgaatatttaacgctctttattcctcacattatagatttaatctttacaactgcatatgagataggttatgtattaccattcccattttgcaaatgagaaaataggcttagacatattcagtggtttttttcaagatcacatagctagttttaaggtgcttgaccagaaatttgactgtaaaacaaatttccaccaaattaattgcatttttcttcattgtcactacaaaatttgaagaatctattttcttgggaagaactatagacctatgagcatagtgacagttaaacagtagttatctctagggatggattatagttttatgcttttctgtataatctgaatgacctacaaatagatttggattttataatagaaataaataaataaatacaaacagttattcaaaaaaagtaacctaaaactgagaccaaaattataataaaatgaaaataaatatcaattgattaaaatatgtgcaaagaaattatataaaatactgaaatttcaaacacaatcagtaactaataatacaggcatatgaaattttcaacgttcaattgatgcaacctacagagacaaccatttcattcatttcaacttaatatatccaagctctttcattaaaagggctttattttctttgctatgccacaattgtttcacattttttactgaggcttacatattattatataaggggctgcttattattttaagctctttatcttgtttgttgactaaccttctgacatcacagttgcagcttcataaacaactgcatccaaagggaagatttccacaagtgaagttcctttaaatcaagtaaacttgttcagcggtatatattttaggtagatgcaatgttttcattccaaggcaccactatttttacatcaaatctaagcttccattgatttaacaactcatattatcttttgaaccaccaagaaagtaaaagcatgctactaattataataataagcttcctctgattggaaaatgcatcccaatttccaagatattataatgtggaaaatgggcatcctagaatgctgacctactcaacttttggagtgagtggggagaatctggcaaggattagagaacacaggttcaactcccaggtgtagtaagcttcatcacttatcttcaagcctatgtgctcctctgaaaactggggagaaatgatatctccttaatttcacatgatggttgtaaaaatagtgagaaaatatatatgaaagaagctgccaccatgaaaggatgttaactagatccaaaatttggaaataaattttatttattttcttagagataccacaaaactataaattttgtaaaatataaaggttgtcaaactgaacactcgaagctaaggttctctttcacttccctctgcattttcttacccagacacagacacatacagacatacacacacacacacacacacacgcacgcgcgcatgcacgcacaaacaatatttgattaccgtagcaatagccttagcaaggtttctgaagagctgaatgtaagcagataatgtgtgcggtccataaattgtcgatgctgcctcatatcgctgagcctgcaggaaaggcagggagagttgtatatggttctgcttatttaaatccatttacagaggtgtagcattttgggtaagtgtgatgcttgacatctcacattattcaaaactggcacaatcttcaagattatgtatgacaaaagaggatgggcatttccatttactggccaaggtaagtgactcctatggactacctgttaaaagcagtgggttctctcggcttatgccatttagactgtcactctatttactatgaaagagggtgctagctcctaagctttagtctattataagtacttgtaatataagtgctttcccccagggcatatatcagaagaaaaataaaacaaaataaagagtcctagtaacttctggataaatagttagaaggtgctaactggagaaagacatttaatccatcacaaagccatgaaattgagccaaatgcatcttttagctgacctccaggcctttggttcttctacaggaatttcaaagttatcaaatctaaaaccaacctcaccacttcagacataccagcttcctccacaacattctcatctcagcgaatgtcatctttccagtctcccatgtgaggatcagccggcagttaccttagactcctctctccctcatcctgtatcctatcagtctccacatccggtaattctgtctccttcaaatctcctgagatctttcattttcctgtcttactttctcctaaggtacaaatagatttcaccttagttcaaaccctcatttctcacccagatctctttttttatatttgtattaggttcagaggtacatgtgcaggtttgttatataggtaaatcacatgtcatgagggttggttatacagattatttcatcatccaggtaataagcacagtacctgataagtagttttttgatcctctccctcctcccagccttcaccctcaagtgtgcatgttcatgtcttgcccagatcttaattacactatggcttcttaatcagtcctctgcctatacacaagcccttccaattcattttctacactgccatctattgacctttctaaatcacaaaattttatcaaagcattctcttgcttagaatcctactgcagttcccccaaagccttccttactgagtgaaggctcagtagcatagcatgcaagactatccatcagctaacctgtgtctcccactctggctaccatctccttaccatcaccctccgcatacttactccatgctactcaacgaattgtggtccatcaatgtgcctgccctctggacctttgcatatatcgtttcttctatataggatacattcttactctttatttgcttaactctcacttgttgtcaagaactcatacagatgttacatcttcctgaacagtcccagtcctcaaatacccagtctgggctggtgctctttctctttatttttataacaccttgtgcatgcctttcatgaaaatgtaatcatctgttcttttttctgtcttcctactagacccccagcttccagtgatcttgagggaagggacagattcttttcatcattatgccccagaaagtggctagcacagtatctgtcacaatacatatctgttgaatgaatgaagtaattaatagtaatacttgctggagtatatccctgtgatatggacaggagacaggaaaatattgggtagaagagagtggttccctggcaaaggccccacccttaagcctggaaacctgtggccctaaacaagaacaagcatttctgcttttgcaaccaaacattcctgttttgcctttttgttcactacgcccccctatcctgtacccatataaaccccaaacccccagctccacaaacagacaaggagatgaacagaaaagcagaatggcagaatggcacagcagagaaaagagaaggagcatctgaactctgagaggagttcggctgtggatggttggagaagagattggccactggacagccaaactccaggggaagatcatcttcccacaccatcccctttccagctccccattcatcccacggagagctacctctaccactcaataaaaccctgaattcatccttcatgtctatttgcaacctgattcttcctagacactggacaaggacctgggtaccaagagggcactgagctgtttaacacttaagctatctgcagacagcaaagctaaaaaagtgcactgtatgtaatacatgcccacttgggcttctggagtagcaggcacccatacctagatactgctgcagggaccacatggaatttgctcctgccagcacccaaaagcacttaccttggctcctgcacctgcctgtctgtatgctccccttcccattaagggtttgagcatatacagcagccaaacagatgagccacacccctgttgcacatactgcaggggggttcagggaactttcccatctcacctggaccaggagacaagctagtaggggttcctaaccttgtttgtgacatggactcctttggcagcatgttgagacctaaggacctccctcagaataatgtttctaaaggtgtaaaataaaatacatggaattgacaaaggaaaccagttaggttgaaatatatttaccatactataataaaccaatgttgtgatacagtaatgtatgtgcttctttattatgctattgaataacaagatatatctgtggatctaataactattgtgattataaaatagcaataagagtaaaagacatttctagacctgcaatcactgtatgtgatatgaaaatatctgtggtgcctattggtgacagaggtactgctaaaataatttgtttgtttcctatatttataattgactgaaatgcttaataatagttagaggtagtgaagaaaggatgtaattcttcctatccaagtttagcatcattaagatccctttttcaatgggaattcctagaaggcagggaccttcaggaaagccaacagagggtagcagggcagagtctactcttagtatcactgaatatttaccaaggggtagactgtatgcctctgtatgcactgctgttatataccagcagatatattattaacagaaattattaattatgagactctggactgttttcatgttttacttaaaaagtacttgggctgctttctggactatttataaacaatgaaatattaccagctaccagcctccctcaaactctctgggactctgtttcttgatatatatcaatataataacaccctacttctggatatactgtgaggattactttaaataacatttgcaaagtcttaaccagtgcattcaataaacagctactagtaggagttttctccagtgctacagaggcttaaggcatcaaatgcattaagaatagtgttagaaatgttttatgccacaacccaggcttgttaccaatgcccctgacaaaataattaatttcagggaaaatgtaagtcagtaaaactagaattctgacctggacttaaaatgatgtatttgaaactcttaaatacggcctctggcttatcatcctcttacctgttatacctgaaacataatcatctctcagaaacatgactgggaaagtttacaaagcaagtctgcatttgacacaatagtctttactggggtataattcatttaaatgatgaaaacgttttgctttacctggtattcttcataagtggtaatgtaatgtgtatagacgttgcatagacctgaaataacaacagtcatgttctgcatcccatgagatgcaaattcctaggagagaaaggtaaaacccaataaaattactcttcatctttacgtatattttcattctgttatccttaacacacaagcattgattacactattagtttaagatatttttcttaataaaatttttctaactctgcactacagttggacaagtcaatggatctacaaataccttgatgatcacagttgcagatgtagaaacttcttactactaaaatagggatttaaaaaatcaacttattacaaaatctaatgggtggctattagctaaccagaatagtaatttccagcgctaagtaacaagacatttttgacatgtcattttagaaccatttacaatactgcctgaatataaagaaaattcaaaatacagcacagataaaatacagaattcccaaaatgtaatacattttatttagactgttcacaggaatttaagatattgaggtacttagaggttacttagtatttaatgtatacaaacattatcaaattttaaaatattaatacataaataccaataaaatatttttaacctaatgataatgcccttatgttttttaagtctggttcttatactaccaatatttcatattaaccttagccattaatttcaagaaatgtggaactctagatataggatcatagggataggatatactttcctcttcaccaaacatgaacatgtagatatgttattttatttttaacttactgcttgaactgcctctcgaagtcttcgtccagacatggtcctgagtcaagaaaaaaattatgtaaacgttttcctactagacgtatgcagagtacacagaaacactggcagtgaaagccaaaaaattaccctggctcatcacacaatagtaaaatatgtaggaacccaatgactatgaaaagctaaacttgaactttttttctgcctgtcctagcttcaaaataaatcctaaactgaaaacagtcaatttgactaaaagaaggaaacagaatcagtggttatcactggcaaaaatcatcattattttccattcttgagtcaacaaaatgatcagttgcagtctatgtttataaaagctgaggtaggtagaaaatacattactgtataagtgtaataaagccaatgtggctgaatcagaggtgagtaaaggggagagaggtaagaaatcagatatgagagcttgatgaagaacagatcatgtaggagcttgcaagtttgaggatttacctggaatgaaatgagaagctactggagggttttgagcaaagacatgttattatttaatttatactttaaagggcttaatctagctgctgtgttgagaaaaaaaaactgcagaggagtaaaggcagaatgaagcagaccagacagcaggttatttcaaaaatctgtgtaaaagatcgtggtaacttagaccaggaagggaagtgacagaaggtgttgggtagagtgtacaaaatttgctgaagaatttaaagaggaagaaacagaaaaagagggaattcaaggatgactccaagagataggacctgctggaaagatataaaattgccagttactgagataggaagacaacatatcaaggagttttaaaacattcttccatgcttttaatacctaatctgattatttcaagtacctgtattttaatatgactgcaaatctttctactgatataataactcatggcatcattttaatttgggataagttttttttaattttcatgtctgcctcaggtgagccatcaataataagcatagagatagttattcttcagaggccccagcaaaagagggtaggaatatttgccactgtcaccaaacagtacagtaggataccaaggggtcaacacagaatgatcttttcatgataagaagcaattccaacagaacatacaacaaacacatttttaactaagtaataaaaagaaaaacttacgtaaactccccggggatggcagttatggccaaggacccaagggtaataatctgaacatcaacaatgtctggatgccaggggtgaggttttgatagctgagaacccaaaacaagaaaattatgttagggataacactctctctatggtcaacagacatatagtggtcccagaatttcctctagtttctaatttatgatgtagtattaaatattctatatgggcatttatgtcctagtcataacatgagaatttcaaatgccaaagccccattaacctgcagaaatcaatgaagtttttggtggatctgtcatcgtgaaatcacaatgtgtaacagataaccaaacattttcctagagtactgttggtgactattcttatacacaataaataaggaattccatttggaatagtttaacttaataatttctctttttattataatcgcactttaagtttacagtttccaagtcttactttattttccaagatttctcccaagagaatttaaccctttccttattcagaatactatagcctgtccctctattccttcctttcctctcttctttcaagaattttaataggatattagggaaaaatgtatttttaaaatgcttctaactcaacaatccaagtttttatgaatactgaaatgaccttttgacatttagaatgcaaaatatatgtttcaaaggagtgtaaaagaaaattgctttagttgataatgttgcctgaactgtgagaaaatttagacaggaacatgttttgttttagatgacctgaaatattttcttctgcagaaaatttggtgctgactcccttcttggaaccaacaaaaataaattctgagtaagataaatgttcatcttattctgcctttcccactgtcctaattgttgtatttattaatcataagtgcaataggtaaatcaatataattcattgccataaccttcattccttagagtcatggaacccattttttaatattaaaaacttgatatgggaatatctaaataagacttcccatctcagtagatatctaccattcattacctgacagttcacatatttaaaaataacaatatgctaatttcactatgataacgaaaatgcattacttctccggtgtgaagaaggatgggctttggtttatgacattctttaatttcttcagatggctttcccaggatctggtcccgaatggtgtcccaaaatggatccccttctgttttccctattagaaatgttataattagtatacttccttgaaccaaccctctcaaaaaagtcattatcttgacaaatattgtacaataatcttttaaggagtttcagagattttattgaggttgttgttcaatgattccaaacagtttgagtaatagaatagaaaaaatgtcctgtgcatcctaagacatgagccattgtttaattagatcttcagtgtggtcaagagaacgacagagtatattttgtcaatgtccttaaagttttgtttctattactcctgctcattcatgttgcaaataaaaacagtttgacataattaactgcagatttgtggactaaatcacttttttcctgttttgaaaatgaaaaattacgcctccaactcacaataccagttgtctgacttatggtccctgaaataatttctcctgaatttagttatctacacacacacacacacacacacacacacacacacacacacacacacacaaagcagtaaaaaacaaaaataaacttcatatgcataatctggggtaaaaggttttgtaactataaaacttatgaattaagaatctacactctattcaaaaaatgtaataattataaatgtctgtgtaacataaactgaaaactcacagaaatgaagaaagaaatacacatttcagtaacaatactgaaattttcaataacccactctcaatcatggatagaacaactaggcagaagatcaacagaaaacttgaactagacctaccaatctatagaatactccacccaacaataacagaatatacattcttctcacgtgcacatgaaatattatctgtggtagatcatgtgctggctaaaagacaaatctcattaaattttacaaagtagaaataatacaaaatatgttttccaaatacagtgaaatgaaattaaaaataaaggaaaaaatggagaagcttgcaaatatgcagaaattaagcagtatgatctgaaatagctaataatcaaggaagaaatcaaaggaaaatctggaaatactttatcatgaatgaaaatgaaaacacaacacatcaaaacttatggtatgcagtgacagctgtgttcagtgagacatttatagttgtaaatgcccatatattaagaaagaagaaaaatctcaaaccaataacctaacttccacttgaagatattggaaaaggaaagcaaactaaatcaaatgttgaaaaagaaggaaataatcagtattcgaaagaaaatcaattaaacagtgagtagaaagaaaacagaaaaatcaatgaaaccaaaagctggttttttgaaaaggtcaacaaaattggcaaaactttagctagattgaccaagaaaaacagagagaagacttaaattattaaaatcagaaattagaatattaatactgactttaaagaaataaaaagaattataaaggaaaactataagtagttgtacgctaacaaattagataacttagataaaatggaaaaatttctagaaagacaaactaccaaaattgactcaagaagaaataggcaatctaaaaaaaaaaactataaaaagtaaagagattgattcataacacatttttaactacttacaacaaataacagagccagattgctttactgctgaattccaccaaccaaagaattagtactagcttttccaaaacttttccaaaataatagaaaagggaacacttcctgattcattctatgaggccaatattatcctgatataaaaccagacaaagatatcacaagaaaagaaaactacagaacattttctctgataaataggacacaaaaacctacaacaaaatactagcaaactgaatacagcaacacagagaaagaattgttatagaacatgaccaactgggatttattccaggaatacaaagttggttaaacattcaaaaactgattaatgcagtacaacatattaatataattttttaattacatgataatctgagcagatacagagagaaatatttgccaaaaaactaataccattttatgataataacactcaacaaactaggaatagaagtaaatttcctcaacctgatgaaggattaaaaacccagagctaacattatagttaatgatgaatgactgaatgctttttccatactattaggaacaacacagaatatacactcttttcacttttattcaacattgttctgaaggttctaggcaggcaattaggcaagaaaaagaaataaaaggcattcagattggaaaagaaaaattaaaactattaatatttctattttaagatgacatgatcttgtatagagaaaaatcctaaatcatccattaaaatattagaactaataaatgagttcagcaaggttgtaggatataaggtcaatacagctatctgttgtatttctatacattttctatgaacaatccaaaaatgaaattaagaaaaaatttccatttacaatagcatagaaaagagtgaaatactaagaaataaacttaacaaaaaatacaaaatttattttttgtatttgtcttaaaattacaaaacattgttgaaaaaaattaaagagggtctaaatgaatcctaaaacatctatgtacgtggatcagattacataatattgttaagatggcaatactcccccaaattaatctgtaaattcaatgatattcccatcggaatcccagctgacttctttgtaaaaatttacaagctgattctaaaattcctgtggaatctcaagaaattcagaagtcaaaacaatcttggaagaggaggacaaggtagaaagacatactttctgatcttaaaggaaacaataaccaagagacggttatactggcacaaggttaggcatatagatcaatggaatagaattgatcatccagacataaagccatgtgtcaactaatttttaacaagtgtgccaagattatagaatgggtaaataataatctttccaataagtggtgctaggataactgaatagccatatgcaaaagaataaaggcaggccattacctccatgatacacaaagtttaactaaaaatggatccaagacttaaatgtagagctaaaaccataaaaatcttataagaaaatagggggaaatcttcatgacattgaatctggaaaaagattcctatatatgacacaaaaccatgagtaacaaaagaaaatttagacttcataaaaattaagaatgtttgtgcttcaaatgatacaatcaataaagtgaaaaaacctacagaatggaagaaaaaaaattttttttgagacagagtctcactctgttgccaggctggagtgcagtggtgcaatcttgtctcactgcaacatctgcctcctgggttcaagcgattgtcctgcctcagcctcccgagtagctgggactacaggcgtgcaccaccatgtctggctaattttgtatttttagtagagacagggtttcacaatgttgaccagggtggtctcaatttcctgacctgatgatctgcccacctcagcctcccaaagtgctgggaaaatatttttatatcacacatctgataagggaacgtatacagaatacacaaagaacatttatactcaataataaaaagaaaaataacccaaattttaaaaggagaaaactacgtaaatgacatttctccaagggagatatatatgtggttaatacgcacatgaaaaggtgtttgacatcattaattattagggaaatgcaaatcaaaaccacaatgagatatctctccacacccactaaggtagctagattcagtaagtcagataataacaagtattggcaaatacattaaaaaatcagaaaactatacactgcctgtggaaatgtaaaatggtgcagccatttcagaaatagtctggcagcttctcagatgattaaatatagagttatataatccagcaattgcactcctagatatatacccaagaggaaagatgaaaacaaacacccacataaaaatcctatgaatatttatagactatttatagattcataataaccaaaacatgggataacccaaatgttcatcaactgaggaaggtttaaacaaatctgatatgttgatacaatggaatattattcaaccataaaaaaagaatgaggctgggagcagtggctcacacctgtaatcccagcactctgggaggctgaggcgggcggatcacttgaggtcaggaattccagaccaccatggccaaatggtgaaaccccatctctactaaaaatacaaaaattagccaagcgtggtggcaggtgcctgtagtctcagctacttgggaggctgaggcaggagaatagcttgaacttgacaggtggaggttgcagtaagctgagatggtgccactgtactccagcctgggtgacaagagcaaaattctgtctcaaaaaaaaaaatgcatgctacaatgtcaatgaacctttgaaagatgatgctaagtgaaagaagccaacaaaaaatgccacatattatatgattccatttgtattaagtgtccagaataggaaaatatggagacagaaatattagtggttgcttaggtctgggggcagcgggtgcggtacatggtcatgtacaaacctggaaaaccagcagaccctgagtttaaaaattaataaatgtattggctacaatgaaacctgatcagagaacagaacccagaagcttcagaagctgaaaccatagattttactggacttcaccttaccctgtgtaaaattgaggcctccaactccatcaatagtgccagccgcaaaactgtagcccaatgctggtttacatgtttttgactaaaggaaaagttttaaaaacaaaacaaaaatgaaaaagacaaaagttaaactgaaagtaaataatgagatcaaaccaaaacttcacccttggggcataaccagtgtgtctcagcagcacttactgcatgtgtggaattgagccagacagtcacatctgtcatatccacccactggtgtgctgaagccagtggtcctgttacctcctgggaggcagaggcatagagttcctagaaaacacacaggcttattattccaagcaaaaaggctaaagtgagtatctccaactgtactcaggaagtaccaatttgatgcaatttggaaatgcatctctcagcaaagcttttgttttgctggttgcttagaattggccaccaaccacatgggtctctctctaccaaacccaggagtttcccagaagcttgaagtctccgaggctgttgacctgtatcaactccccacaaaaatgaaattatagtgatacaggctgtggcacaaaaggcctcaatctcacttgaaagatcaccaagaaaatttaagattaggaataactggaccaaaatactttctttgctagagtgagagtgtatctttgtgtgtttttatagggtcttcctttcagaatacttgagtcctgcagcaggttggggacaaaggtggcttggaagacttcaagccctgctttgtctgcagcacttcgcccacccacaatccactcttcggtgcttttgcttttgtgttttaatatggtcaattgatgctttttcaatcttatgggaaacatgagtgaaaacaagtttaaacaactctttgtttttattaattcgcattatataacataggcaaatcctgtttcatcaaacgttctcttgcctgacacttagctcatttccactctgtccccaccccagtttcaatggccacatgagagctctcataagtcatcagcaagaccagctgcagcctgccactcttaattaagagagaagttgtgccttgctgagaagagaatgcagaatgtgggtcaaatctctatgactctccggctcagaatgggaacaaaatttctgacactaaagtgtgtcatgggtgcacaccctaaatagaatctgtgaatttagaataatccactgataataccacagtaattaaaaagaaactgcagcgattaggctggctgttgctaccaattttgtgtcagattgttctttaaaggtgcttttgtccttccttagttgctcttgaaagattttagaacccttggaataaactatttaaacacacacacacacacacacacacacacacgcagcaaaggtatgaataagctatgaaaagaaagagatttaaccatatcaaggacatctcagttcgaggtaatttttttgtctttttgcctagaaatctgtctccatagaagctgaaacaaaatatggggacaaaatgggaaataaaatttaggagggggaggaaatcagagtaattcatagtaatctcactggagaccagatttgatgaagagagcttcatcaaaaagttttgtaaaaagaaaagaatagatggatgatctttgcatattgaagaacaccaggaactaatctaaatccaagtttcaagaactggagttctatggctcagctttctcttgtcaccaaaggaaaagttaagagatagttgggtgacttttggcaagcaaaggccttaaagacttctgagaatttgaatcaatctggtcatatctaatgccacaagaaattgaaaatcttatagtctatgttcctagtgtctaagcaagcactctggctttctagacattctaaaatagaatgttttcctgattacttggttttaaatgtacttcctataagaagtcagacctgagcagtcagacagaggttcccatgtggattgcaaaggccacctcccaagctgacctcttctagactccccagcacaacctgagcatttgctgttttctttaagtattcaacttcctaatgaaccaagtcaatggattttaaaggacaattttaaacaaagattaaaggagcgaggcccatggcttacctttgctctctgatacatggcccgtcctataatttgtgtgctgtcaaacatatcctgtccaggtcccttagcaatgcacatgctaggctggaacaaaataagatatgatgcattcttggccaagtaagaaattattttaaggaataaagaattataactgaatctaagcaaatagatttttaaaaccacattcttgcatttcttttcaggtagtctctcaaagtacaaactataaaaacaaaatcatacctggaattagaacagtgaatgtctttagaaatgatctattctggagcctttcttttaaaaataaggaaattgaggctcaggttaaaagatgtgttgctgattatgcaggtatctaatatctgagctaagacttgaagccaggtctttctattgactgcacatctttctacttgcttgttcttgcctctgattcttactcatgatcaccttaaattgaaactcgattaaaattatattggaacaactagctggacttctggggaaaaaaatcaataaacaaatctggctctatttcctacttcttatgtcagaaaaaattgagattgatcaagcacttaaatattataagtggaatcaaaaaattactaaaagaaaatatggataaacatattttgtagtatgagggtgtgggcagaccctcctgaaagttatctagaacaagcttagttaaactggacaggtaaaacatcttaaatttccatagggggcaaaagacataaataagacagaaagacaactgataaactttaggaaaactttgtactattttgacaaaactaagactttaatatattaggagctttaaaaagtcgataagaaaaaaatctttattaatactggtttaaccccgttgggtggagttgactgggatggaataaacatcccagaaatagtatacaaaaaaagcattatcacaggtgaaatgttctacaaacacaaagaataagaacccaaaaagtagcatctactgctcatgtcaaagttgaaaacaaagctaaatgaacattgtgggagttaaataaatgatggtatagcctaacttgctgtctttaaaacatatcacacagatctggatatactcattgaaaagtttctaagacaaattaagtggaaaactcaagtcctggatacaaaactcaaaatccataaataagtcatataatgttttttataaatgcataggtaaatacataggaggaggtatgagaatagtaacttctgggaagagcaaagtatagaggaaagggaggcgaagagggactttcactttttactattctctgtacttccacattatttgaatttttacagcaatttttttgcttgtaatttttaagaaaggagaagcaatttaggtcttatattaaaaaccctataaactttataatccatgagaaatgtctcaggcaggcaatttttactacaaacttgtgactttcgaaatgccaaagcaaaatgtttcagattgaacaagtttggggaagggtagagttaatctctgacagttactgaattgtctcaccattcaaaaaacttaacagtcactcaaatggaaaaatataacttcactcagttaaaatttactgggtttggacaggtgcttttgagaagagcagatgctagggagaactaggccagtgtatactagaagacaaggtatttgtaaattaatgataaatattcaaacataaaatgtatttgagatgcaaaaacaaagatttcatgtgccataattacctaccccaccaatgggacaagtgctattggcgttatcacaggactctcctgtgttgatgcaacgtggtccaagaatgttgggggacacatctcctaggtttgatgaagaaaaggctgctacaaatggcccctgccaaaagaaatgccaagttgccttttattctttcctatttcctgtaatgaatgccattagaaatacaaacattaaatccactctggcaaactattcaaaatcatttgcaggcaataaaaagaggatataaaatattctgtaggttgcctgttcactctgatgatagttccttttgctgtgcagaagctctttagtttaattagatcccatttgccaatgttggcttttgttgctattgcttttggtgttttagtcatgaagtctttaccaatccctatgtcctaaatggtatttgcctagattttcttctagggtttttatggttttgggtcttacgtttaagtctttaatccatcttgagttaatttttgtataaggtgtaaggaaggggtccagtttcggttttctgcatatggctagccagtttccccaataccatttattaaataggggatcctttgttgctattgcttttggtgttttagtcatggagtctctacccatccctatgtcctaaatggtatttgcctaggttttcttctagggtgtttatggttttaggtcttacatttaagtctttaatccatcttgagttaatttttgtataaggtgtaaggaaggggtccagtttcagttttctgcatatggctagccagttttcccaacaccatttattaaacaggggatcctttccctattgcttgtttttctcaggtttgtcgaagatcagatggttgtagatctgtggtgttatttctgaggcctctgttctgttccaatggtctatatgtctgttttggtaccagtaccatgctgttttggttactgtacccttgtagtatagtttgaagttagttcaaccattggggaaaacagtgcgatgattcctcaaggatctagaaccagaaataccatctaacccagcaatcccattactgggtatatacccaaaggattataaatcattctactataaagacacatgtacacgtatgtttattgcagcattattcacaatagcaaagacctggaaccaactcaaatgcccatcaatgatagactggataaagaaaatgtggcacatatacaccatggaatactatgcagccataaaaaaggatgagttcatatcctttgcagggacatggacgaagctggaaaccatcattctcagcaaactaacacaagaacagaaaaccaaacaccacatgttctcataagtgggagttgaacaatgagaacacatggacacagggaggggaacatcacacactggggcctgtcagggggtggggggctggggagggatagcattaggagaaatatctaaggtagatgatgggttgataggtgcagcaaaccaccatagcacgtgtatacctgtgttacaaacctgcatgttctgcacatgtatccaaaaacttaaagtataataataaaaaaaaatccagaaaaaaatattctgagaaaactttttattcctgtaaaggctcacattacagtcggtatacatattattactgaaaatattccaattatcactgattcaagtgggagagtttcaaattatgcctcaaacagaaatattttaaccagaaacactgtgtgcaacaacaaattataaaatgctgaccagtcaatctagtctattgtgttttatctggagctcagagatccctttgccctttaaaaataaatatgctcttggcttaaacagaaaaaagcaaatacagactttcctgttgcacaatgaaactaaatataccatccacaatctggacttgcccttgatgtatattttctctctcttcaacataattagagccatgcaagtcctctgcctcaacccaaccactctaccattctaccttaaatggctctaattttcttagggaaagagataactaagtattggagatataaatcttttttgatactaaagagataatttatttcatagtgcctagcactcaggcagtgatcataaatagaaaactctcttcttttccctaaaatgcaggctaaagtgagaaaatagtaagagtgagttttgccaacaaaggagcttgctttggtttggatgtggtttattcctgccaaaactcatgttgaaatttgatctccattgtggcattgctgagagctgtagcctagcaggaagagactgatccctcctgaatagaataatgccctcccacaggatgagtggcttctcactctctagggaatggattgtagtagttcttgcaagagcaggattgttaaaaaagagcctggcttcttcagtttttctctcttgcttcctctttcacatgtgatctctttgcacatcctagttcctcttgttttctttctttttttttttttttttgagacggagtctcgcactgtcccccaggctggagtgcaatggcacgatcttggctcactacaacctctgcctcctggggtcaagcaattctcctgcctcagcctcccaagtagctgggactataggcacacaccaccatgcacgattaatgttttgtatttttagcagtgacggggtttcaccatgttggccaggctggtctcgaactcctgacctcgtgattcacccacctcggcctcccaaagtgctgggattacaggtgtgagccactgcattcggcctcctcttctgttttctatcatgaatatttatgtgcaatattctgagaaaatttttattttattggtaatagcatgaggccctcaccagatggagttgttcagtcttgaacttttcaaccaacagaatcatgagccaaaataaacctcttttctttataaattacccagtctcagttattctgctaacacaaaacaaactaagacagagctaaatgatcaggctgaatgttaatggaagctaatatctttataagggaatattaattgtaggtaagggcctgggactcttatcccattatatagtcttccaaatttgggcctggagcagtggctcatgcctgtaatcataacattttgggaggccgaggtgggcagatgacttgaggttaggagttcaagaccagcctgaccaacatggcgaaaccctgtctctactaaaaatacaaaaattagctgggcgtgggggtgtgcacctgtaatttcacctactcaggagactgaggcacaagagttgctgaacctgggaggcagaggtttcaatgagctgagatcgtgccactgcactccagcttgggtgatagagtgaaactctgtctcaaaaaataaaaataaaaataaaaatggtgcttaatccttgtatagctctaaaaacaaaagtaaatatcaacagtttgtcatattttcagcttaatcaaaaactactgttataaaaatcttgaactttgcccttccttattcaactaataactttatgaagcaatgaatacaaggactatgtaacacaaaaagcaaatggttagtactcattttttatttttctttccacattagggaggatggtaaatgctgtctattcgagcataccaatatgtgagattgatgatgacactttattctggagatttgaatcacctcttctgaatgcagcatgaatgatgacactcagtgaatcaagatgaagctttcaatgatataaattctcacctgtccaggtagatatcctttgttcttctcttgctcaagcaggtaagatgcatagcccacattgtcactgtttacaagatggttactgttgttcatgctgaccgggtggatggcaaaccagctgtaaaagagcaggaagctctaaattaatcaggagaaccagagaactggggccaagaactatgactgggagcttaagttttctccagcaggaaaaaatatttttaaataatagacattctacatctacattctttcattgttcatgggcttaaaaatacaatgcaaaaaatgtactcaagaagtctgatcattttcttaaattaaaaatacaaaactccattttcatgactatttcatcattggcatcatcattggactggtcagttaccagatgacatacctaaagaactgtatatacatggactttgtccttcaagataggcacacaggtagtaattattcaaatttatccaatccgacatttactaagggttacctgtatgctaagcactgaataaactgtggtttactttcagaatctcaccaaagacacagatgtgaacaaatggctttaacacagtgtgacaaacgttgcgaagaaacaggcataaagtgttcagggaccacagatgactaacaattaattcttgtgggcattacagggagaggaaacagcagggtaaatgcacagaggtgtaaaagaggatgttaggcataattcagtatatccttatgcctagtaataccttgtttaagtgtaaagttatacagtttacaaactaatttcacatctgttaccttatttgaacttcacacaactctgagagacaggctgttttacctctactctgcataggtgacccagagaagcaaaataatggtccactgttcacagaggcccaggactcaagtctgggtcttgtgacaccgtgtccagtggcctttgtaggctcaaaccctcacacaggtgaaaaggatatttacagagtggaaggcagtaaagcagattaactggaacgctcaagaaaagagagatgctagttcataaactgtcaggttaacttagaatttaaaaaaaaaattgttgattcaattctttgttgaaaaatctttaaacgtttttgcttacattcctacctaagcaatgtaatgcacaaaactaagcatctatttaatggctagaaagggtttaggacttcaagatcatctttcaagcatcagttcttattgcctatcagaagcagatgtagggcagaggtggcctgctcaaagcccattggctctacgcaggcaacacaaatgagtcatgctagttggtacaatagggactggtgtggactgtagaaaacttgcagtgtctaaagttcacagcctctactcagctccagccaagtgttgccttatgggagtataaaccagtgcttccagctcttctcctttattcaaaaggggccacaaatccatgttttcatatgtatttatcaactttaaaattcttcaggaagtaaatggcatggaaacaaaggacgggaactgctatacattaagagacttaaaacttgtagccaacaaatgtagtttgtgatctgattcaaacaaaacaactatttgaaacaaacaaacaaaaaaagactttttgatataatcagggaagaccgaacacagattgggtgtcagatcatattaagaaattaattttaattttgttggttgtaataaatgattggggttacatattttttaaagtctttatctgatgaagataaatactgaaatatttatgagtgaattgtatctaaagacacatggacacgtatgttcgttgcagcactattcacaatagcaagacatgaaatcaacctaaatgcccgtcagtgatagactagataaaggaaatgtggtacatatacaccgtggaatactatgcagccataaaaagaacattatgaatatgtcctttgccggaacatagatggagctggaggccattactcttagcaaacaaacacaggaacagaaaaccaaataccacatgttctcacttataagtgggaactgaatgatgagaacacatggaccaacagatgctggggcttattggagagtgaagggtggaaggagggagaagattaggaaaaataactaatgggtactaggcttaatacctgggcgatgaaataatctgtacaatgaagccccatgacacacatttacctatgtaaccaacccgcaaatgtactcctgaacttaaaataaaagttaagtttttaaaaaagaagtatataatgtcctggtatttgctttcaaatactctagccaaaaaaaaaaaaaaaaaaaaagtgaggggaaggataaaacagaatgacagagtcttgctaattattgaatctgggcaataagttatatggagattcattacattaatcactgtaggcattcgaaaatttctatgtagtttcttttttcatgttggcatccattttgaatttttcaaaacacaatgtcaagccaaatcaccaatgagtgagctgaattcagtccctgacatggttatttgcccctgtgctaaggaataaacatttattgggctgaagatattctaagagtcatcccctcgcagttatttgcaaggtgtttacatttaggaatattcttctattaggtttgtgtgtgtggttttgtctctttctcttagaactcaagtatcaggaaattctaatcaactagtgttttccagttacatggattttgcttttttggagtttctttagtttggaagaaaatgtggtggtagcattttggcttcccaaccaaaacatttccatctgataccatcacactgaggtcagccagcttcagccaacactgaatatttccattacaatcaaagaaaaaccatagaactattctgctgacattatttagctcttattagacaaaggactttatgtacaagatctcattttattctcacagggaaccctttgagtcaagtactatcattatcttcattctgcaactaagaaaactaagtcccagagtggtaacgttacctgacctaggtcacacaatggtaagtcaagaagcagagcaatgaattcaggttgtgtgtgtgtgtgtgtgtgtgtgtgtgtgtgtgtatagatagatagatgatagatagatagatagatggatggatagatagatagatagatagatagatagatagatacagatacagatagagatatatgctcttatccactgtggaatcctggttctgtcccttctcttcattcacttgctcattcactacacatttggttaactttgactctgtgccagccaccaggaacataaagataaatgaggtatcatcttggccttgagacatgcttcacaaaagaagtgacacttgagctaggtcttaaaagatgaggaagagctacgcaaaggaatcactagataacgagtactcctagcagaggaaataacatctgcaaaggcatggagatatgaaggagggccctgtgttcagagaatggatagtcagggcggccagagcagaatggatatggacaaggaaagatggcagctgtatcattcattcaatcagagtgaatttattgggaatcatgttgattggcattgtgtgaaggatcgtaaagaggaatcagatgcatttcctaccatcaaggaccttgcacaattggccacaatggtaactatggagaaagcatgtactaagaatttcactctactagttagatatagacttgatttcttcttcttttgaaaaagtgtctcactctgttgcccaggctggagtgcagtggtgcaatcatggctcacttcagccttgacctcctagactcaagtggtcctcctacttcagccgcccaagtagctggcactacagatgtgcaccaccatgccaagttaattctttttattttttgtagagatggggtctcactatgttgcccaggctgatctccaactccagagctcaagcgatcctcctgcctcaccttcctaaagtactgcttttacaggcatgagccaccacacctggcttgatttcttctttattccatttattttaagcctcagaaaataaactgaactttttctctagaaaattaaaataaaataagtgttcagaaaaaagttatttaaattgaaggaaaggaagatgtcatatttttcctccattgtcctttgaaatgtgcactattaaaatagcaaacttgtcacagcaaccaaagtactatagttatggatgaatatttataaagatatgcagaaaggtgatcattttaattttaaaacacagtacttatattttattttatctggccaaaaaatatttttccaagcaaagttcaaaagaaaggaagaaagctttagtttcagaagttaagaattcagacataaaaggatgaatacatctctaataataagcatttttaaataatgcttatgtcacagctaaatgtaaaataggaagcaaggtgctacttgaatcagcatgatgtaattaaaaatacagcagaaagtcaggagattggggaccttatcctagtttgtagcaaaattagtcaaaatttctggactaaaatttaaaaattattgagactgaaaaataatagatttcaagtattatagaatcagtaaacaacatattaatataaaacactacaatttttttttccttctgtgtaaaggaggcatttggagaaaaagatctctagtgattcagatattgcatgtgccctactctgaaacaaaggtaaaagcagattccatgcactcagacctgggcctccatgtccagtgtgcaagctgtgccctgtacaaagaacactggcaaagggggtaagtaggtggttaaatccagcctctgtgcagctcactgagcctggcacttcagccagcccagaaaagaggatgcgtttgtgtaacttagacaaaggttctacgtgctagcatggccctccccgacctaaacgcccacaaatagggaaatagaatactgtgtatccattcaaaggtacgttcatgaagattcatagcaacatgggagctctttaggaaataaaatataggaggctgtaatgggttgaatagtgtcactcaaaaatgcatgctcatctggaacctcagaatgtgacttacttgcaaatatgggttttatagatgtaatcaaggtaaagattaagtgatattatactgaccgcatgtaggctctaaatccaatgactagcatcgttacaagaggaaaggaacagagagaaacccagagacatagagaacaaggtgatatgaagatgggggcacagattggagggatgtgtctacaagccaatgaagccaaggattgatggcaaccactagaagctaaaagacatgcatggaacagattccccccttagagcctccagaaggaaccaaccctgctaatgccttgaatttggacttctggcctcctgacctgtgagagaataaatttctgttgttttaagccacctagtctttgataatgtgtggcttccctaggaaactaatacagaggctaatattgtgttacagtagctgaaaataccagctctggggtcagacatgagttacttaatttatttgaacctcagtgttcatacctgtaacataatgataatagtagtacctgcatttgacaattaaaataactaatacatgtgaggtgcttagcacaaagactggctgataccaagaatggaataaatgttcactacaagaatattggtgatgctatactgatactactgctgctgcagctgcagatgatgataatgatgataaaggaaagagatacaaagctctgagcataaataaatatatatatatacaaatatatatatgattcgtaagattaatacaatgttaaatatatgggggcggtgttcaacattcgcaacacatgtatattcaacccacatggtatgggcatgaaatgattcagtgaggatagcctgccctcttgtgacagagacgtgagtgctcacaaaatgcccatgtgctcttctatttcccagtctcatttgcaaggtggggcgtgtgaatacctctgactaataacatgtgtgcagaaggactacccaatcttcactagactttccatgagtggaaaataagtcttcaatgtgttaagccactggaatttcacattctatcttgtgtggcacttgccattaattaccttcacaccctcgttttcactccctcacaatcatcctcaccccaacccactgcaaactgtttggagaagaagaggaaagggtgtttcattgtcttatactggaaggattattgggcccagacttttacctaaaaggcaagctaaattttaaaccagcagaagaaaagaatacacaccggactgctcagattttaaaaagataatgagctctagccagaagagccctcctaaagttacaggcacacctgggacaagcatcctgcagaatatttctaccaactccaccccagagaagtgatgtacgttctcaaggaatccttttgttatcttcaaaaatcctgaatgaaaaagaccttctaaataacaatattggagaaatatctcattagggtaaattccattaagttacagcagtcaaaatccttgcaccacgcctttagtcccagcactttgggaggccaaggcaggagtttgaaaccagcctggccaacatggcaaaaccccatctctactaaaaatataaaaattagccgggaatgacagcgcacagctgtaatcccagctactggggaggctgaggcaggagaatcacttgaacccccaggaggcagaggttgcagtgagctgagatcacgccactgtactccaggctgggcgacagggcgagactctgtcaaacaataaaaattaaaaaattaaaaaatccttgcacattacatggtaagtgcaacaagaaacaggaaatggccaatagactattgtttttttatttgagccaaaccgtgaattgaagaaattcaaaggaaaacaacagtgatttgacttttttaagcctgttacttggcaacaattgtaaagcatggtcatactaagattggcaagagtatgacaaacaacattctgctcaagtttgagtaatgggagagtaaaccaacaaaggggtgttgggcaatttataggaaaagctttaaaatataaacattctctttggctcaggaatcccattctaggaatttagcttaaggaaatcattggcaaatatgtatctgttcaagaatgcttatcataggccggatgtggtggctcacaattgtaatctcaatactttgggaggccgaggcgggcagatcacctgaggtcaggagtttgagactagcctggccaacatggtgaaaccccgtctctactaaaaaactacaaaaattagccgggtgtggtagtgcgcacctgtaatcccagctactcaggaggctgaggcaagagaatcgcttgaacccaggaggtggaggttgcagtgagccaagattgcaccactgcactccagcctgggcaacagagcaagactccatctaaaaaaaaaaaaatgtttatcacgatgtattttatgatggaaaacactgtaaacaatctaaataacaaatgattgctgattagttgagtacattatgatacatagaatggaatactacatggcaatttttaaatggtgatttaaaaaatactaactggcattgaaagatattcataaggtattgctaaattaaaaatagagttaacaaactgtaaatataataaaatcccactttttaagaaaaatattataaatgtgcttagaaaaagtctgaaagactatgtaacaaacttttaatagaagctggctctgagtgtcaggatctccacacgattttttgactttttaatttttttcttactgtggaaattttagaaaatatataaaagaaaagaagattttaaaaattacttgatacaacaccaagaatgaaccctaaggtaaactatgggtgatgatgatgtgtcaatgtaggttcatcagttataaggaatgtactactctggttggggatattgatagtgagggaggctgtgcatgtattggaagaaggtgcatataggaaatctctgtacttcctgctcaattttgctgtaaacctgaaactgcttttaaaaatatagtttattaattaaataataataaagtctattgaaaaaaaaactatgcccagcactggcacggtatcatttctgcattgttctattgttcaaagcagtcacaggaccagccaaagttcaagaactaggaaaataatctccaccttttaatggagagtggcaaggtcactttggataaaacatggaataagagcaattgttgtgttgttgcagccatttttataaactacaatctgccatttaaatatatattttaaaaatagctatcaatccaaaaaaagtaagagatgagaaaggaggaaaaagaagcactgaaaaggtgagacaaatagcacaaagtgaggagatacagaaaagttcagatataataatcacaattcctgaaaatacactaaattcatttaaaaaacaatgattgtcagagtacaaaagaaataactaaagctatatgatattcataagagacacccttaaaatgtaagaataaagaacggttcaaagaaaatgatagaaaaatatacatggcaaattctgggttagccacattaacagactatgtagactttaagacaaaaaaaacacattattagataagaagaggatcactgcaaaaacaaacagatacttgatggtctcagtacatggagataacattgttaatatttttatagtattttaaagcttctagtgcacagtgagtgaaaccaagtgagcattcacgtttacagaatgagcttttagtcatgtgtatttcttattatatgttccacatagaaaaatgaacagaagcaaatgcacctgaatattaaccatgattgattcgaggtagtataattttaatttaatttttccttcctttctactttctttatttttcaagttttctatggtaagcacacactatttttatactgaaaaaaaacttagaaaaaaataataatctcccagatttttttcaggttaagtaagaactttccagaaatctaacaatcaagttgtccaatatctccagccaactatttttttatggctttggtttctaaacttgggacaatttaaactacactaggctgatcaatctttgttatcagtcaacagtcaccatcttggtcatctaaaagcccttttaggcaccttcacctacggggcaggggagaggggtgaacctgacccaggatgaaagctcacttcacaaccatgaccaagctccactgaagaagaatacaggcaaacagaaagtaaagttagagcaggaagacagcatcaagcttcacaacatggagcggaacaagaaaaagaggttcagtgaaagatatagaaaaagaaagcaggggccaagcacagtggctcaggcctgtgatcccaacactctgaaaggtcaaggtgggaggatcccttgaggccaggagttcaacaccagtctaagcaacatagcaagaccctgtctctatttattttttaaataaaagcaataaataaaataaacagaaaggaaggctttataaatcagaattcatgctaatgatagagaaggcatttaggaagacaaagacaagatgagatgaaaaaaagagaacaagaatggtttggtagagggcagtcactaaggtttcagcatttgcaatttgagtggggttaagtggacggaggggagagtatagagtcagaatacagaaaaccatagagaataaacagtcagacattacaattcaagaaaaataattcaattattctgtgtcaattaaaaacaaaacagttttatgtaaaaaaagtttttaaataaagaagtcatagtcatagatgatagagaagatttatatatatactgcaactgagttctgtaagtcaacaccatttgaataaatgagtgtaatagcacaaataggatttttttaactttttacacaaatgattcaaatagcttacacaaatcactgcccctgtcatcttaaaaatatgcctttaaagggctcccttacaagaccactgactataagaataaaagggtttgcaatacataaatagaaggcagtggagaggagaggagaagagaagagaggggaggaagaagaggaggaggaggagaatcgggatgaggagcaaggaggaggaagaagaaaagaagaggaaggagaaggagaaggaaggagaagaggagtccatgtgactgctgcaaattcaaggaagaaaacttggtggaagaaaagaggaaggcaaagagaagaaaagcaagacaaagccttttcagttgcagcatccttgaagaaataagtcggcctcctcacctgtctcagagctgccttcgtaagtgtagctatgtgagtagtagctcttccactgaccacaactaccactcagattatctgcacttgtgactttctttttgatgtagacatttgaaacctgttttgctttctcccttcatgttttcttcacacacatagtgtcttattgcatccgagactctcaaggttctgtttattttcctctattggatgacagactctttgaagtaccttacagagtctcccaaagtgaattttgtaaatgttacacagcttatattttaattcacaattcagaacatccacaacatgttctccatgtctggagaaaaaaaaacattgaatgctttcatgtaaggggaaaaaggcacaaagatagcaatatttttctgacatagaattttctaacagatttttctgacatagagcaactagagcaaatggtggcttcacaattgtagagggcttaatggttcatggaatagtttcaggaacataattttatttcattcctcaagtctacactcttcccaatccttcgacagccccaactcccaacccaagtttgagacactttaatgagttttcattcctcttggtatagaaaaacaaattctttgtcatgccatctaatctctatttcttactttgtcttgcaacaccctgccctgttgacctctgcactccagccacactcaccttttaccagttcttcaaatgcttccccatttgtgttaaatgttcttttccaatccccccattttgccagttaattcctactccagtttccagctcccattgctgtcacttcctcagggaaacctttcccaatctctctgacaaggtcaaattcctttaagaaagttctacacacctgcctttcttagcactgagcccaattataattttacatgtattgtatgcctatctgtatgccttctgtctccctcagtagacagaagtcctataagggcagcaactccatctatatttgttcatcagtgtatcccataataatctctgtgtggagagaagatatgatagccacatttgaaaatacggcaactgagtctcagagagtttaatggattcattccagtagcacaaacatgggtactagattccttatttcaaggccagggaatacatcattccaaggaagtattgcgtggctcatagtaggtccctagtgcagacttgctgaatgaaaaactgaaaacaaaaatgagagtaagaaggaatgaattatgaactcaaatatggttttcattgtgaagaagatagtcttggctgtgatgctgggcaggtcacatcacctttctaggcccttgttcctctgctgaaggttaaactaggtcatctccatgctctgtgattctgagttgctgtgcttccaaactcctcacaccttgggattctgtctaacagcaggcatctacatatggtgggtgagttacttagcagcccacatttgactttatattttggatcatttttaacgtattcaaagagcaattacactatgcaacaagaggcaattgcaggagcaattacatcaaagataacatacggcagctcagaaacaatggaaagttattgcaggatgttaagcacaacagatggaaaagctttgctataaccttgacagttgaccgaaagacttccagatacatgatacaattgcatgtatggaagcaaagaacatctggccaaaataatagtatttttgaattttctgttccagttattaaatgattcaaaaactggccaggtgcagtagctcacacctgtaatccaagcactttggaaggccgaggtggaggatcacttgagaccaggagtttgagatcagtctgggcaacaagcaagaccccatttctacaaaaaattttaaaaaatagccaggtgtggtggtgagcacctgtagtcccagttactaaggaggctgaggcaggaggatcacttgagcctaggaatttgaggcagcagtgagctatgatcacgccattgctctccagcctaggcagcagagcaaaagcttgtctcaggaaaaaaaaaaaaaaaaaggttcaaaaactactaaaagggaattgtaaatggtcttggtccttcagccaagagttaaatagaaactataagggcgactctatctccttgtcccaacaaatttgggatactcagtgtaactagcagagatgtatgctgttatcctgcccttcttgtaattgaatgccccactaaagtgctctagaatctggacctgttttacctttccagtccaccttttaccaatgccctgacctcacccacactctggccttatggctctgtatttttcatgactccgtgagaaatcccatgactccttgaaggtccaactcaaatgtcattttctcttggaagccttccacagtgctctcaggaaaaactcagggctacctcctccaaactcccacagcattatttatgcccatgggatagcactgctggtcatctgattcatgttatggttacttgtctatatatttgtctctgtctcttgccccaatcaccccaccagcttgtgagacccttaaagatagaaaacttgccttattcatcataacataccccactcacacagttacatgcctgacatttagaaagcgtgctgagttaaatgctaaggggaaactaatcaagagataagttgattgtagtagaagaataagtccattatgtcagcccatatagcaaagtttattagggagtttttagtgacttcacttttaacacaaaagaggaactcaaatgctaagaatttcaagcattctaatatgctggtaatggaattattcagaagaggtagaatatgttttctattcctttttagctaaaatgattaagcttttttctatgtcaggcacagaactagagttttgtatgcattatctcatttaatcctcagacaaccctatggggtattactattcccattttcaaataggatagttaaggtctaagtgaattaagttactttctccaggccacagggttagtaagtggcagagggctgggacttgaagccaagtcaaccttacctcaagacctgaactttttattaccatgttgttctccacctagttttagggccaactgtggtgtgtgaactgtgaatcatagtttttaatgtttttcttcaccactttgtcaattttactgcaagttttattcacatagcatcttttacttagatattttataattctacttggcagaccctttgtcatctttctaatcattattatcaacattttaaatacttactttatcctatggtatgcacaaaaatgcttagggatgagaaacaggaagacagggtagtcacagaacttgtctaaagtcacattgctaataaggacaagagcccagagtgaacccaagccatttgactgtagcacccagcactatctggtacttccctagggcatgtctgcatcatttgcaagtccataggtcaaagagtctggaaccatgttacccacccagtcaattcctgagtcaggccagttgcagtaaccaaaatcacatatgaatgcaaattccttattttcaagaaaacaaaatccatgtgttttcctaaatgctgtcactcccagataattgtgctaaaagctggccccacctgtaattttccctcacttgcttcctttaggtgttctcagttctattttatccctacttgccattgtcctgcattggacttaatccttttagggaaacacaggtaaataatctcaaagccataatcactttcctggttggttagattgttttttcattttactaggagataactgtatatcatcatggaagttccacatgtgagatcttgataacataataagtgttaatgtttactgaatttttgtatcatatgcgagatgctgtgccaagctcttcaccaagatctctcatttatcttccctgtattaaatctgttttgtaagtgcagaactaagccctgagagactgagaaccctgtacaaggcccttggctggaccccagttgtgtctgacttcagaacctggactcttaaccacacaacttattctcagtgtgtgctggtactattctagtctcttttcccttctctttaattaagaaaagctacccgacagaattatttttaaaaaggaaatacagtacctgataaggcccaagtcatctccattcaaatctaccattttcaaaactatcatttccttgtctgtatttgaagaatacctagtcagtaaaacagaaaagcacagtcagttctgtgttagagcctaaccctcatgtaagatgaacagtagcagctgacacaaaaacaaaaatgcctctcagtaagtgagatgtcttgacaagcagtagttctgtgaactgtatccagtacctcatttatcagctaaggaaaggctatgcaattgcgatcaaagtttgggggactaggtcaagcgactggagctgaaatacacatatttttatataacatacaatattatataacatatatgtatttcttacaaaagggatttatttgtctttgaaatttctactcatatcaatttttaatgaaatctctttaaaagagcagggaatttgcaaaatcaaaagcattcaagacctgcaacttaagtgttcttttatgtcttctcaagggaaatcagattacattttctaaaaatcatctcctttgaaagctattgaaaaatatgcagaaaaatgttaaatgtcaagtggtcaagtggaaactgtggtattattttacagtgttacagtaaccaagcacttctcttctgttacaaacctggttcatcacttaaaaaaagacaaaaaggcaaaataatcctctcccttagtttttccattcaaatatgtgggtttatttcttactcttctgtccatattctttatccttttattttctctgtcttgccacactcttgtggactaagatgatttattctggataacacataataaaagagctattcattaatttaataaatatgcattgagcacatttttatcttcattttactgatgaagaagctgagagacaataaattaagataagtaaatcactaaaggtcacattgctagaaagcaataaaactaagctgagaccacagttgttcctgatttcaaagcccagagtccttcaaacatccacactcgctcccataatcaacaaagtggaaagatacattaataaattggtgtttgtttctacattcactttttgtttctgcttgttttagattatacagatgtttttaagatatcatagctgtaatactctcttgggacctcaccatattcatcaagtaacagccctgtacttagattttgttgctgttccctaaagggaatgaaacgatttcattttgacgattcctcctcaccttgctctctctgactgcggattttgaaggtaagaatacggacttctgttgatctgcacaccatccacatttcctttattgatgaagattttgcctggtttcatatttgtgtgtgctatgtcaatgctctgaaggttaaaaaagagggggatgttataagcttagaaatcctggtggggacaataacttagtcaatataaacagaagagccctgtgaacaatttcctttgtctctaatgggtccacattacgggataaaagctagagaaccacatcgctgttgacaatctggaggtaaacagaaatggctttcaaggttgagataagggaaatgccgtgttatacggaagcacagtactgattaatgcctgagctcacaaaaagtctcaactcctgctctctcaggactgctaaatgaggttcagtttgtcacttcagatagccaaaatgggagacttgactcctacaacactaatacaagttttgctaacatgcaactgtttccacctccctacccttgccattctaccaccaaggcagagttgttcaaacttttttgacagtgaactacagtgagagatacatttttcatcataacttaatacacatcaacatatgcatcccaaaacaaaagtccacaaagcaaactatatcctgactgtgtgtcatacactatatcttacaatctattttttagcattttttatgtaatgttttttgcaatccatgaaattgatttcataagcctttaatacattgcaagcctcagtttgcaaaacatcaatgtaaagcaatttctgcctatgccagctggatctctgaattttgggggtgacattgtaagaaaaaatagagaataagcctggaatacaataaaatgaagcaaaacattagcaaggatcctatgcaacaaaataataagctgaaagacagaaaagagaggagtataagctactgaaaccagaaacaggagaggagtttaagggtatttgtcaggagcaccacggaggtctgtatctatactagagaacttgaaaaattgggatgtgtgtttataagttggattctctttgtactttgggaaatattttaaaattttagaattatttgtaattacttttggctccttcatgggtttctctttgtgtgactttgtgcaaagaacaggccatgtagtgccctctataaagaaccccaaaccaaaatgttttctgtctgtttaaataactacattgggcttagtcccatagaagccttcttttccaatcatccatgcctcatccctaacagcccatagctcagaacaagaagctaagatagagtcagggaggagaaagaattgtacatgctaatactatgctcagacccaaatcctatagggattctttatatcacatccaatcactcctaaaatacctgtaagcaatggtaaagaacagctgcctctggggctctttgcctaccttcaagataccagtgaccatgtgctgaaaagtttgattgctaaatccttcactggcaattacaaacacggtatactggaaatatcctgcaggacctgaatgagtgtgagtgccactcaggatgacattatctcttctgtacagggagccatatttactctgcagtctgttcaggaccttcaagaaaaaaagtaattgaactaagaagagggataacataggagctcaacatgagaaaaggctttgatgagttcaatcactgatccataccaataacatctgtattagtccattctcatgctgctaataaagacatacctaagactgagtaatttataatggaaagaggtttaattgactcacagttcagcatgactggggaggcctcaggaaacttataatcatggcagaaggggaagcaaatatgtcctccttcacatgatggcaggagggagaagtgcagagtgaaaggggggaaagccccttataaaaccatcagatcttgtgagaactcactatcatgagaacagcagcatgggggtacccaccctcatgattcaattacctcccatggggtccctcccacgacacatggggattatggtaactaaaactcaagatgagatttgggcggagacacagacaaactatattaacacctctttcaaatggcccctcactgtatgtttgaggatattatcatagtaataacaacaaaataataataacaatacctaacattttatagattcttactataagcaaacacaatgctaggtatgttatatatattatgtatttaaaaatctttattacaatttcaagagctacacaggtattgttaagcccatttttagctgagaacattgaattatacaaaagttaaataatttgcctgttgatctaataagtagcagagccagactccagaccctcgtctaactagagaaccagtactcttattcattcatcattcaacaggtgctctaagcaaaagaatatatgaggttcctgtcttgaagatattttttttctaatgaaagacaaagacagtaagcaagcaaataaatattaaatattatatcatagagtgatagatgctatgaagaaaaacattgttgcataaggaaaaagaaagtagtgggtgttagtgaggaaagatcttctaatgaggggctctcttttagcagaggctgagatgaagaaagcaagtcggctgtgcaatatctgggggaaaagcaactcaggcatagtgagcagaaactgcaaaggttttaagctactctagtacctcatttcccaaatgaagaattcagtgtgccttgaaacgaactcttagacttgttggtctagaggatgccatccactgtgatgcaaggacaccctaataatcctgtggagaagcctaagtggataggaagcatcctgtcagcactaacttgctagccatctgagtgagcaaccttagaagtaatttcttccaccttggtcaagccatcagacaactgcggccctagccagcatctgagtgccacatcatgacacagaagtgattacatatgacttgttctaaaacaagtcagaatcgtctaaccaagccactctgggaatcctgacacacagaagccttgaacaacatttattattgttgttttaagccactaaatttttaggcgatttgttgtacagcaatagacaactaatacaaagagactcagtaaatgtttagtgaatgagttgatcaatgaacatccaaatgcatgactaatgtcttcatatggtgcatacacatcaagaaaacaccagacagaatactggtgatgttgctgagtatttgttgctgattatgctttaataagctgcaatctaaagtttggtatcattgtgtcttttttgtgaaagataattaaaaaatgacccagcagtatgtaacacaaaggataaatgcttgaagggatgggtaccccattttccatgatgtaactattaggcattgcatgcctgtatcaaaacatctcatgtaccccataactatatgtaccatgtacacacaaacattaatcaaagaaaaaaaaatccagcaaaagtgtcaaacccaaagcaattgttagcaatgtttaccttgagtatggcatagacactctgataagctgtctctctggaacacacaataaaattaaaagccctcatttgtattgttcaccaatttctgtgatgtaaaaactcctcatcatgatcaatttcaagctaccaaaagcttaacagccagctcacaatgtttctgaatatttacaaattggttcttatgagcttgtgcaagctagttccagctcactgctggtaagtggggagtagcagcttctatgctatgtacttgatatacatgaagataatcattcaacctcttctattgcaggtgaagatctacaccattctcattccagtcataaccaccttgcctcattaacctctccttgtcccaaagactgattgtttggttaccatgtccacataagcaattctatgatgcaagacaaatacagaatggaagtataatataacaagactaacatccttctgtattccttctctttggtcctaactccagccccaatcccccaccactctcgcatattattccataatgtaactaccacactcatgaagaagaaatgtataaagagaagagaaaatgatcaatgaagggacatcatgaaagctgaactaaagtcagaagctgatgttcttaacaatttgcagctaagacaggaaggtagtagagaaaaagagccacgagtcaactttaaagctccctaaccccatcctatttattcctaaagaactgtgacattagggctttagaattaaatgcatttcttcatgtctactcaagaatcaagcccttaagaagacagaaattatgaatcttgaattttaaaacaagaaagactacaaacggtacacaggaattttattttaaactacagtctctgatatgaagccagacatatgggacttctagcggggagaaaaaagaaatacataaaacctagtcatataacaatgccaggaagataaccattaaaaataacgtgtttcccagttcatgaaaggagggtattttaacacaggacaaagcagctacatttatgtctaccgctcacttctgtcttcagtttctattccatttcgtctcactgacactcttgggagcatgacacagaaaaacctagaaagtccttctgtttttctgtcatgcctcactgcacagagatcttccataatcttcattctgtgctggaaatttcacctatcttaaagctgacactgagaacctacatagaagcaggtgttataaataatattaatgacacttatttagctacatttatttttcacaccttcctttgggttaatttgggaaaactaagtgggttcatttaacagccttcccactgggtctcagattgcacggagatgtaaaaataggaagagatagaaaaatggtgcccactattgacttgataacacctacaaaacaacacattaaactcctccccactctacccgccaaagtctaccttttggttcttttatttctgctaatgaccatactatttcccaattagagccatgtcatttttcagaaaagcagtatagtatagtagaaatgagcatgaattctgacaccaaaacacttaagtttgaatcccaactctgacagttcctagctgtgcaaccttggataagttacttggccctctgcaaacttggtttctcaatctgtcaaatgacataataataatacctccctcatagagtcgtttggaggaataagtacattaatccatacaaggcactgacaagagttccagactcagcatgaatattatgttaagtactggcttttatgtctattcatctccaaatctcacatttaatttttttttttttttttttttgagtcagagtctcactctgtcacctatgctggagtgcagtggagtgatcttggctcactgaaacctccacctcccaggttcaagccattctcctgccttggtctcccaagtggctgggactacaggcacctgccagcatgcaactgatttttgtatttttagtagagacagggtttcaccatgtttgccaggttggtctcgaactcctgacctcaagtgatccacctgcctcagcttcccaaagtgctgggattacagacgtgagccaccacacccggctgactcacatttaatttcctatcccaccaccacgtagtctcactgccatcacattggtttaagatctttgtgccagtctcacgtgataaagggggaaattgttaggcaaagttacaaaaaataaaaacccttccagcaactccagcttccctttcttgttccttcagccttttaacatcttgtaaaactcccctgggtgaaatccctctgtttgaaatacctagtatgatgattactgttttcttaactggaccctcaccaataaagcctcagtatcactttaaagaatctgctaatttttgtcctcacttctagttccactctattccaatccatatcaaacatctctacctgcttaatcatcctaaaacaaaatggtgtttacatcactccgccactcagaagatttctcagagtccatatcacccacagaattaaaaacaagctggcatctcaaggccctctgcaattatgataaacatatcttccagatacatctccaactacatgcctccatatgtcctaatagatctcctctgttccctcatgaaagagtctacatccctcctttgtgcctctctgtgttcattctgtttcttccatcagatttctctgccttcccatcctaaccatttaaaattctgctcactcaagtgtcatttccaccatgaaaatgttttcctaatttgcattcctgaatccctattggtgatcttaaaagaccatatgtccacaaagtctcagatattttgcccttcaagaagtaaagcttactttttcaccactgagtgtgagctggacttagtgacttgcttgatgaatagaacagggtgaaagtaacggtgtataacttctaaacctgggtcatacaatgcactgtagcttcctccttgctcattctcttgggtcactcactctgagggaatctagctgctgtgtcgtaaggataggaagagtgaggaactgaggcctttggccaacagccacatgaacaaaccatcttggaagtggaccttcaagcctgggtcaagctttcagatgactcaacctttgccatcaccttgattgccatagaacctaaaccagagccacctaaccaagacagaattcaagcttttcagagcgggatacctgaagtattatataagtattaggacagagatttagttagcatcgaaataggagattttatttggttggagaatgttaggattttttagaaaattacgttaatcgaggggctagggttggagtgttcatggttaaattatgatttttagggctctgactaggttcaatttaagtatcttgtttttgggggctggcttacctaatttaacaataaactcagagatggggggagggcagatctgcggatttaatcggaagcactcctttaaatactgcgtgaacgtacgtgtgtgtgtgaacgtacgggtgtgtgagaacgtacgtgtgcgtgaacgtacatgtgtgcgtgaatgtgtattgattattatggccttcaagcatgaatgaattagcaccttatggtttggtatgttggctcagaatattcaagataagtccagctacagtcgattccgcagggatcaggctcccgccgtggtaagtggcagcatcccgaaaacaaaaacataccaaatgcatgacagtgctcccatgactagttattagggtgatagtcactagtacattgagatataaggtttgcaaatattttctcccagtttgtaggttgcctctccaccctccaccctcctgtttcctttgctctgcacaaggtttataattctaagtaatcctgtttatctatttttgcctttattgcctctgtttttgcgtacaaactaaatcctcaaaaacctgtattatcatagttataagatttattttggtaagattccaaatagtttaaaatgcttttgtttgtttgtttgacataatggcatcagatataacatggcataatgtcataccgttactctttcacttaaaaatcgaaatgtaaacatttttaaatatggcaaaaatgtacattagaaatacattaaatggtaaataacaaactgctgttaatcccacatataatcatggcttacttttataatactttgaacattataaagtgattttctatctcttattatattttataataacatgtgggatagctggagtagatattattttctctgccttacatgtgccaaaaacgagagagggagagaagtgaagtgactttccccatattgcaaagacacaatggtgcagagctgaaactttactgattatttgaaatactttacaatttttctaaaacatagtgagatctaggttcttagtgttataaccagccctatttgaaaatttctcaggatattggttcatcctttattaaaacaaacaaacaaaagtaggatcaagttaagaaaagcagaatgttttggtaggattaggatctcaaaataattatctgaagccaataaagtgtcacattatttttcttgctttatttttaattctattatttttcctgtgtctatatggtgatataataacctgagaaagacggttctaatcacacatgtactaatcacaaccactcaacataattttaaagtaaaatttaacccggatgtaaatttaaaagttcttaaaagtattcaacttctgtgtctatacttaagactccatccctaggtgtccgttgattatgcaagtaggattaacaataattaatttatcaacctaatctttaagcagtgcaagcattattattagactttcttaaatgggcactataatatgtatcttgattgagcttacttatttcatagaagaatggtatttctaaaattcttttagagatttttgatattcaatctcaaatgtttaatatattttccaaaattatcaaataaggatgagcactagcatactctaatatttacaggaaaaatataaacaaaaacacttggatttctaggttctttaataatctcaatgccaggatgaattctctaagtctgaaaaaattgccatgacttggtactaagatcagtatcaattcaaccattatttatttaaaaaaaataacttaaataaaagttgcatttaccattttgtgcagtggttctcaaccctggttattcctctatagttttaaaaaatgctgatacctgggtccttggcccagtgattcagcataaattagtctcacatgtggctttgtcatcaggagcttaaacagttttccagtttatattaatgtgcagctgaatttgagaacaactgctttagtcttttgaaatgaggccaggtgtacatataaggccttactgtgcaaagatttaaatttgggggacattttggtcatataaagctggttaatacagatgaagtttaaaagaaatagactcttacttaccagatatactaacactttgcaggaatcaagatcattttgagagaattaaaaagaagagaaaaataaacttcctgaatcctgaatttataattacatgttctacctttctcgtactataccatcttgattgatgcttagaataaaattccaaagaatctgaaacagcatacaaaattatatttgtatgattttcatgttcaacatatttcagtgaatttcaatgattaaaaattaattatccataggtgatatatatgattattccattgccaagactgttacattaagtaaggcagctagttcccaacagatctggaaatcaatgttgcaatctgaagaaggcttttaaagtcaatattcttaggtacatatataattttgttataatctccatattattgcaattcaattctacagaagacctttcttgtcacatcaccagtccagtgacactggtagagtgtatcaaaggaaatgtgaattgtcctcttaaacttccaaaccaaataatagagtgaattgatttatatttcaaccttgagtacggaagacattaacaattatgatccatagtaaaaatcctgtttttatgcagtataatttattgagactcatttaaaattcacataacatttgattgtatggaaggtgtttacaattgtaatttttgcaacattgaaaatgccaaatgtgtttgattaatatcaacttcctgcagccacacctgtgtaatatttatgcctctaaattactatttgtggtaattagcagtttttccattgcaattaacaagcttcaatctcgaacattgtctgagatagcttaactttttacttttttcttagttgaaatgttttaattatagtttaatttgttattttagttttccttttgtcttcttggagtttaacctcaataacattttgagttggttcttatttatttgcatcaaaccactctaaaatgtaatacaaattattatcactccagctacatggaaaaactttaacaaacctgtgaatgacttaatcattttaacaattaagacatttacacacacacacatttcttctaaaaagaatggttaaaactacctatatactggaaacatattttcatataactttgcttattattatttgtatttatattgcataaattatgtcagtagctagaatgacatggatttgacaagaatagagaaaaggtggtttcatatcccagactcttaaaacacacttttcagtttaggacacaagcgctctgaagatatgtatatagtcttcatgtctggcatctaattcctatgagtttccttcaattaatactaaacacatgtatagaaattgccataaactgagctgtatgatggtaataatccccaaatgacaattcaatcatccagatctttgggttgtcctaattccattatacaaggtggatctaatggtcattagatccctagatatgagggatccctagaaaagtattttcttaatcttggataatagttttcaatgctttagtgaaaattgcttatggaactcttcgattttaatcaatctttgaaaatggctctttcaatggttgataaggtaagtcatcacacagtacttctatattgtaaaaaaaaagctaaaacagtaatcttaatatacattaggtattaaatacctcttatttccagatgtatacaatagattccttttatatcttagagttaaaaccagagaaaaaaattgtctgtctccataaaccatgcactctcttttgttagataaagaaaaaagtgtaattcatctttatcttctctgatctattatgtgacttttaattttgattttaaaaattgaacttattgatttttttcttgatacataaattatacatgttcagtgtctatagcgtacattaaaaattgtttaaaatacgtataatctcagcaaacagaaaatttatttttttatttaaaatattacctaacattttaattttcctaaatatcaaaactgtcttattagcatacactctcaaaataaattttattctatcttctttaataacataccagtttttcctttatatgtattttgaacatatatttgcttcactaaatgctattttaaaagcatggatttcatttgttagtattccataactagcaattataaagttggacatttagatttatttcagttttcaatattcacttctaaagaaaggttacaatgaatatttctgtaattaagtctaaccacacatgcaagattatttctttagaatacattttagaagtagtattagattaaggcatttggcttacagttttaaaatccctttagaaaatgttctgttattataatggtctatttttgtatgccttgtattataatttgtatcaaatatatttttatatgcatggtatatataagaaatgcaaatctaattagataaagcaacaaatatattacataattgtgagatatagtctttaaagttaatatatctgagaagtctcctttttcttttaatcttcacaaatgttttttcttttgttcactctagaagattttgatgtattggttttgaatgaccaggattatttcagaaggattaaactaataaaatattataggcaacaagagcagtgaggtgctgagaggcatgtaaaactgtgagcctatagcatttaatggaaagactgacagaagggagctaaaaatatatattttcggtaccagagcctacttttacaactaataatgctgaacacagcaaacttgaacctatttaaataattaaaaagccttaaatatgaatattgtcaatactaatgttgattttaaatagaattcaaacataattgagaatttgcttgacaaattatacaacctgcatctttactatattgaacacatttatgttgaagtattgtgattataaaaatgtttatcttgaatatataattttcttctcttgtataacatgtataatgtatgtagtaccattcatattagtatgtttcttccttgttaacaatacaaaaaaggtacgtatatgattaagtctttttctttaagagaacattcagaaagcctaaaaataaattttaagtgaaacactagcaaaactttgacctttattaaaattgtacttctgtccccacttgaacctggttctgtagtttagattctgattttatttgtcgaaagggatgcctatgtactcaatgcaagtgacataacatccttcattcaataagaatacaaatgcatgaataaatacatatctattgcaaataaaataaaaataggagagcagataattattgaggtataagttttttactaaagtacaacactctctagtcataagagcagaaatatatttaccagtatagcatgttaataatgggtatttataaatgctgccaaccatatttttaatcaacttaaaaatacatttggtagaacttaagtttagctgcataaatgagagtaatgaacttagttacagatttttggacacatttgccactttaattaaaaagattagtaatcgtaacatttaatgctgctttatattttcaaaaggattagttcaataatgattataaatttccctggcatctttgcaattatcatcatcctcaaatttatagatgagggaattttcagaagaaagttaagtactaggaatagattttgaatccagtgggtttcagttacaagactgttacaagagtatgagtttataaatagtttccaagtgccaataaatgccagtggtggagataaacagaaaaaggtgattttatcacacctgatttaatgctgtttttcttttatatttcaacagtcagtggaatcttggcagtaacaaaaagagaaacaaaatttacattgttaacagtaccgatagagtgacactctttatcacagtttgagagaaacttcaagaagtaaaaataggagatgtagtctacagacacttaagaaattcacattatgccagaaagactaagtagccattcccctagaaattgaagaaaaatagaaactgggtttgattaaatgacagtatgagtgctacatataagacattttctagcctttcagagaaggaagttaagagtacatgaaaagattattactgttcctgtttgcctttgaagattacagaggagtacagtcagcatgcagagacaatattgttgtgacttacagttttaacaatgaattctattgctagaatttccttttttaaatgttttctataagagaattcttacagttctgattattatttccagcaagaaccttagaaccttatgtttctgttaggttcttcttaatcacgtacactacgaggagatggagggaatttcgttattctattctaaaacatacccccttccaatttaaaaatggaacgtttttaaatggaaaatggaaaataataaaatggtcagtcatctaaaccatgattaatggattctctagaacttagcttcttctcttccttcctctgattaccttcctttgcgcatgtcacagctcctgatgaacatagacaatagataagacaattaaccacattaatgtttcaaaacactttattatttgtttaaaattacagtttgaagctaagttggggaaccagatgccacttttacaagggtaaataataaatggtgtgttttaattatgtatgtggcccaattatcatgagtaataagtgaagcaatatttttaaaggttaaagaagttctgtatatattagagtggagaaactttaacgttctaaaactgaataaaatctttccttaagaagaaagattttgtattcaattaaatattataattagttacaatatatgggatatctgtcggaaaaaattgagtaatctactttctcaaagttttatttaaggatatttctttccacattaggtagttcacagataatagtggttttgttttcacagtctttcttgtcaaatcaaaattcatacagcaattcatgtgaaaaaagtgattgactatccttttacaatttacttgataaaatctaagtagccaagaattcaagcctagaagactctgaccaatattatcctttatgctaagaaataatattccaaacctatttcttaggctattaactgccatttgaccctttataagctgttatgtttcaatttattcaaataacatataattgtccaataagtttgcattgcctcagtaccagatctataaaaggttaatgggctttaaaaagggaagaaatcttctgcaacaacacggatgaacctgggagactttacgtcaagtgaaataagccaggcacttaaaaacaactatgacataatctcacttatatagagagtttagataagtaaaactcatagaaacagacagttaattggtagtcatcagaagctagggcatggggaaattgcagagatgtcggtcaaaagacacacaattccagttagccaggaggagtaagttcaaaaaattgattgcacatcatggtggctacggcgaataacaatacatttatatttgaaaattgccaatagagtagattttaagtattctcaccacacacacaaaatatagtaagtaggtgaagatgttgtagaggcccaaattcgggctcatgtacctgatgctcagttgaaaccaaacactgacacaccaatgcttggggatagataaaagtttattccatttggccaaagtgagaacggggcaagatctctcagacatgtcttaacaataagacgaagcagagggggccgggtgcggtggctcacgcctgtaatcccagcactttgggagaccgaggcgggcggattacgaggtcaggagatggagaccatcccggctaacacggtgaaaccccgtctctactaaaaatacaaaaaattagccaggcatggtggcgggcgcctgtagtcccagctactagggaggctgaggcaggagaatggcgtgaacctgggaggcggaggttgcagtgagccgagatcgcgccactgcactgcagcctgggccacagagcgagactccgtctcaaaaaaaaaaaaaaaaaaaaaaaaaaatgcagagaggatatttttgcagctagacagtaagagagggggagttttagggaaccaaggggaaagtctgtgtttctttaatctctgataatatcctgagcaaccagacttctgggcctcagcagttagttgcaacatccttataggcattcattccttctgcaaatgtttttttgttaccttaaagttatcttctcctggttgacaaagaaatagtaaatcagcagtttgcaattgtattgtgagaacaagggatgttggcttttatgcaagcaagcaagggcctaattcgaatttttgttatctcaatcactaaaaatgctgaggtattgacacctcaaggggtccgattacaaggtaatgcatataatgcgtatgtttagcttgatttagccattccacaatgtatgtatactttaagacatcatgtggtacaccttaaatatatacaatttattttcagttaaaaaataaataattcaaaggaaaaaacattaattggaagactcacaaagatgagataacagggaatgataaagaagaggaaaaatgtcaatatagtttcaaataatgaaacataaaaaatggaatcaacagtggtgctttttgatatgatcttgaaagttagcaaaggaaaaaaaatacatgaacaatctagatttataaatattgatctagagacacagcagaaaatagttcagaatatgtttgaatataagagaatattgttaaatatcagtttggaaactttatttggaaaatattaaagtatactgaatagttcaatacttcataacaaaatttctctagaagaaaaatatagacagaaagcagccaaaaactagtatttgaaccttttgaagtatcattacaactaatgttttgtgtactattttgtttttggaaatgctgggcctaagaagaatcagaggagaaacatatgaagcctttttacttcttttttttttttttttttttttgagatggagtctcactctgtctcccaggctggagtggcagtggcgcgatctcggctcactgcaagctctgcctcctgggttcacgccattctcctgcctcagcctcccgagtagctgggactacaggcgcctgccaccatgcccggctaattttttttttttgtatttttagtagagaccgggtttcaccatgttagccaggatggtctcgatctcctgacctcgcgatccgcccttctcagcctcccaaagtgctggaatcacaggcatcagccactgcgcccggccacctttttacttttaagtcaggtgagaaaaaaatctgccttttactttgtcacgggtcccaaagaggacgagaatttaaaaaaaaaaaaaagaagggagacctgatcatcagagcatatacagtgttgtgaaggcagatgtagtaaaatatattatctaaaaaaggactgaagaaactgaaatgcaacctgctaatgaagataggtatggaaaagagatatgaaataagtgcttttggacaagaagatcacaataaaaggatttctgtgaaaagactaaaaacacaaagtcaaataaaatacatcacagaatgtaaataatagacaccagctgcatgggttttaagactttgttgaaggaaaaatataaaactataattaagaatgagattctagaaaaataagaaacatacagacattcagcaatatctaatggtttaatttcacagaaaaaaattaggcatttattagaaagtgtatttataaggaaaccatagaatgagaagaatccttgaccctcctcaactttaacaattatgatacatcaaattcacttttgatggcagaagtgatgatatatttttttaaagtaacctagcctaaagtacgtccttaaccactatcatttagacaattttttacaagcccttgcgttgtgtacagtagcaagctcataagtggaaacattgggcatttagaagcaaactggtgatatggaattttattctctttttttctgtttttattctaaacaaaattttacttctacctcctactaagaaagatctccttatattcatttcctatatggtttggtatatgaataaagggtgataacaaatataaactaaaagatgggtaaatttttacatacactttcatagcatttatagagtaagaaaaataaaggaaagcaaaaaaactacaaacaaaacaattgagaagtgaaagtcaagggctttgactcagaggagcagaatgctggggtgagaatcctcatgacatatgaaaagaaggaacccagtacacacagtagacaattggcaattgagaaaaggagaaacatctccatggaaacagtacagaatgattctttccttgaccttgcgagaaagaaatctaccgtaattttgtcagactaagtaaggatttctgtggccatataaaaatgtgtaatgcaatataagaaagtactttcctcacatgtagttaaagatggatgattgttctgataaaaaatatgcttacagctaaacttgctgccacagtttaggaaaataaatgccaggcactagactaaaccaaggtgctcatgccatccctggcaaatagtaagctcacagtcatctcaaataactgcaagattaatagatgtttcaggaaacaataggtaagtaaattagagaaatggataaatgtgtaaagcttctatgctagtttatgagtgttttagcttagagagtgttaggtcaggtcagtctgtcaggtacttctcacaattgaaactgtataaaattaaaatactcagatttcagatttcagaaaaaaatgtgtacagtgagatgtgatgtacagaataaaatccttccatttgaaggaatatataatgaggatacctagaaaatggtctggaaagaatgttaataaattgatgctactcttttatttgactactgcaggtcagggagcatggatcatctgtgagcatgtctacaaggaggacaaagcgggtagtactatggggtctcttgcatgtaccatgcacactatagtctatgtgaatgctgcttcccagaatcatgtagtgtacaatcttccctttggcaatgggatgggtaatggttatgatgtgaagcaaactttttctttataacctatacattttttttgtttttgcagcaagatttttttcagataccaattttataatgagtgagaatgataatgagggacagaactaccaggtaaatattcccccacgtcttgttgttgtataacatagacatcctgaattagttttaaaaagaatgatgatttttttttcttctcacaacgctattattttaaggaggaaggcatgtgaagactttgtatatagagtcaataagaagattttaaacacgtgcatgtaaacttggccgacaagaggcacttggatctagagagactggcaacatatagcagaactttagcatagcctagagctctgttacagaaattatgagctgggagaagagacaatggtgagctgatggaagtcagagcagccaggttaattaattaggactctcaataaacactagaacaaaaataaagaagacagtaatccgctagaacaaaatggaaaccaaggagtcactacccacccatagacccaataacaatagatgacaatgtttgataagaaaattagaagcaggagagaaattagcattttatgaaagaggttgtagtcagttggacagatggatgtttaattcttgaatcctctatttacacatgctagtgtatcttcctctctggatctgtttccatataagggatataataattattatttcatacagacattttgttgtgttgttgatacatttgtgtgaggtacatgaataatgtatctaagtgtcttgcacaaatcctggcacataaatgttcattaaatgatgggtctctaccaacatccaatatgaaaaaatatttccatttcccaggggcttcagaagatgagtatgaactcatcttagagttgaagaatgtatcagacaggaacaggtcagaaaaagatcccaatctatgtatgtcatgtatttagggactcagaaggagacttatctcatgattagatggtgtgcatgggcaaagaaaggaaaaaaaatgctgctattttcataaaggctgaaaatgcaataattatgggaaagttgctaacaatgattttagatgcttgtcaaacctaaacaggaggtcaccagaaaaatgctctaaatctcttcactgtgacatccacatctaacactcatgcccttatttagcataattttacctggagctctattgtcctgagatcctagaaaatgtagtgtctaggtttctcccttgtaatttaaacaatacttcagaagttagaagacatgagtggataacaggaaacctgttacaggatacaacttgattaatatagatataataaataatggtgcttcctaacctcagttaggataataaataatacatgttccagttaaataataaatgttgtagtctttattacttgaatttcttacaagacatttaaagttcatgaagacagatagtagatctgtgtattttaatcattttttaagcgtccagaacttcagttaatcaaatcagtaaatatttcttttcttaaaatgaaacaatctgcacatatacaactccactctgaagaaaggcaattattttcataattataggaatttctgcataattatgtaaataattgcctttcttgagagtggaattgtatatgtgcagattgtttcattaaaaaaatgtatttattataattaaaaaaggctttatatatacataaagcctttaaggccttttgttttttttaaaaaagaagactgtccctccaaaagtggcacgtagttctacctgttgtataatcaacactttactaatttatggatttaatccactgcttatccccaagatttccgagatcccaagtccaatatagtcaaggctcaagatcaaagtacttacactttaccctcactacaccccttgccttttatactccaccaaataccacctcccagaagttgctgtaaaaagaataatttacctacatacatgaccattaggattctgccttgaagcagacatgcaggaaaatataatattccatcccatggcaacttttctttacttgttttgttgtaatatttttgtgtaccctaagaaatagtcattttaatagattttcaattatagactaatatttatcagggattcattataaaatatgctatgaatttccttgatggtgggagcagatagagaggaatatatggttccatctcttgaacctcctctgtgctctcttatctcaagtttatttcatcagtcaattaatctgcttctgttactgtgtctctagctccccctgcctttccctgtctctcaagcactgtggtttattattccttatcactctaataataaatgccagaagctatgtttcctcactaagacatatcctgggaagtcaataaatacacgttaagaagacaagatttctcaactttgttaagatacagatttctatcattaacaattctgatttagcaaacatttattcacccccaatctttctaacttagtttatctcccagaattctgcggccacaatttggtgtgtgaataactgattgaacttgcaacaggtggtgaatcattaatggcaatgtcaaggcttaaatcttgctccactggttcacccatggctgctctcacataccaagctagagttcaattagaaagttggagatcagtaactccagaacactggccagagggtcagaagagctgactcgtggacattctcattgtgggtaaaggattcattgggtttaatagcagtttatgtcattcttttctaaaaattagcagtaccagtagtctcatgatttaggtaaatttgctgttgattggggtagaatagtagaagtatattaataaaaatgccttttaaaaattacagagtattctttgcactgctgaagtgattcatgaatgagaaattttgaattactacacattaatattttttctagctctcatacctgtataagtctcagaaaggacagaagtgaacagagatgagaatgcaaccctctcttagcaaatgatcaagcgattgtgtattgttcaatgattaattgatattttaaaatgtttccaggaagactaaaacactttttgagaattatgttcttaattttatactcacagctactaaagcaagagggcttcttagtaacaaattatttttacagtaatcaaagaaaggttaaaataagagagtaagatacctaaggccacatggagagtaaatgtcatagctggaaatttggcaatggttttgtgattctcatcattttctattttgttttattttgtcttgtaatacagacttctctgaattattttatttctgacagagagtaatattagactaggcctttatttttacaaagcgtatgatttgtattgtttactaaataggtagataaataagtatggaccaaaataatgagcagttatcataaatgtttacatatatagaaaattgttttttaatggataacctatataaaataactttttaataaacatgtatggttcaagaaggacattttaaattaaatgttcaatgccattttaagaatttgattctctaaagaatatccacaaaatttgataccacattaaaaaaaagatgccaaataaatatatctagaatcctctagaatttatttattgacgaaatcataaggaaaagaattttcatatgtaatttattaaatgataagtgacttgtcatttcatttacttgggaaatagcataataaagtttttaggaggttttcctctagctggtaatttttgacaattaaaaaacttgacccagttttgaaaaatatttgaaaatacttgaccctgcccaaaagccacctgcaaatagcttatttgcatgaacattaaacacaagggctttcatgttccttttacttattactgggataacaaacctccattcattaagcacagcatcgtttttgttgtgaatgaaaaatcagccaactttctgccacatctggctgctaatctataagttttgaataaacagtagacagtcaattgccggcatccattctcttaaaccacatgaagttttttttttctccccagtcaaaatgccatttaatacaatttcatttcatttttcagaacaaccaaggctttaaaaatagatcaggttttatggtgcagggcgcaaagcatgtattagataatctaaggataaatctgttcatatactaagtctctcagtgtccaattgccgataaaagttcaaatagtcactgcagacaggataatttcactgtatcaaaaactggcatttgcattgaaaagtcatttctactcatttttgagaaaccagtagcaaagttattaattttataaaaaacctagactcaatctcagtgaagatcttaatgggttttttgctgggcaaaaagatgagggcagtttaactgcgatagctacaaaacatggcatataaaacatttatttaattgaaaaataacagctacagcatccataaaattcaaagcccagcattagcattttttcccactggttctaaatgaaccccatcctccttactttaaaccttcagaacagttgcctatagatagagttattagtcagacatttgggaatatctttcagtgtagccatatgaaaatctaccagagcacacataagaaaagtcgttcggtaatggaacagacagctatgcctcattaaaatgcttcaccagataaactataacaagactatttgttctcataatttgttacttttattaatgaagcctcccaatatgatgcccctcccttttttattagcagcaatatcaaattttgtcctcagatttatgcatatttgggttcatttcttaactttcttaaacttcaagtttatttaggcccctgtttcaactaacattttgctgaatccttatacatatttatgctatgtattattcccagctttaaaattcccgtttttaaattgatattaactcctcttctaaaccattttttctatatgtaatttatatgtatatatatgacatggatacagaatttccttttgtctcaaatttttgtttattccctattaaatgatgagtatccctaaattatagaagaacagttaagtctttgcaggttttaataaaaagtagccagaccagttctgtaactaaaaccttcactgacctcaattacctgtactcttatgtaaagagaggactagacattctaagaattatcatatagaaagtgaattagttacctaagtgagagtgcttttaattattttctcttttgtaaggagaactaaacttgcttccaaacaggaagagagctcaaaaagactgggagcaatttcaagaaggaaagaatgggatatccctctccttctggcactcagcattgcacccatcctgcaatggaaccatacatgatgagacagttttgggaaagtttgataggtgtcctcaagagtttcaagatgaagctaaacatggccagttgttgcctgcttcttgctttcaaaattctgaaggctacatgctcattgaggcagcttttgatggcaagatggagaaagagaaaagatgccagattcttcttcccactttagatgagtgaatatgctaaatataggccaagtccgtgccacagaagatgtaagaggcttcagatacccactggcaagtgtttgcaagaagtcagcaggagaacaaattacacaggttaacaaataggtagcacagagttacaaagaatttacagattcactcccgacagaagcagcatttgggtgcctgcctctcaatagaaaaagatcagattattaaaaaaaaaaaaaagcttctctcttttcttttaattcttcctgctacaattcttgttttccccgttacaatccgaagggacccataaacagcacttcaaatgtgtcatgtcaccctctcctggctgtaaggtttccactgaaaagtctgctgccagatatactgaagctccattgtatgttatgtgtttgtttgttctcttggtgcttttgggatactctctttttccttgacctttgggagtttgattatcaaaagactcaatgcctattggctctgagatgattgcttgttttctgggactcaattataaggaagcaaagaagggaggtctgggcataccgacatgcttacctgccatgcagatgcaactaaggaaaagctcccagatttaccaagtaaaagtacaagttgcccattgaatttaaatttcatataaatcatgaataatgtttagtatatgtaattcctaaatatttcatgggatatactcatagtaaacaatgtaaattcagctgggcatggtgtgctttatttgacaactttgaactgagtcttcagccaatcctactgggcctctttcagagttgtcccaaattgatgcaaagcagttgcatgtttgtataactacattagccagccatgggtcaatggctgctctctgaaaggaggcaccactttgggcgagttagttcattttagtttgtcttaggacaatatttagtgaaaggtacaggtgtgaatggtcagctgctgatgttccccatgagtgtgggatcgatgtcttcccatgaagatggggtctggatgatgaaccacagtgtctagtacaataatttctcttatgtgagcttcaagagtgatattgagttaatgtttctatatcctacttttttgttttgttgttttgttatgactttgttctcttaacaattaattttccaccttagtgtttcttatactgaggaattgtagctacttttactacagaggaatgctgaggaattgtagctacacatgacgattgcaatttcaaggaaagggaatttatgctgaaatatttgaataacttcccctcttagtttttactatgtcaaaaaaattcatataaatgtatccctttacacaatggtctactgaaatttttggtgaaactaaaacacagtattgccttttttactgtaaaagagaaaaaattaaatagatttatgtacagagacacctattacaaaaaatatttttaaatgaccctacactgtatttgcataaaagacttaatttgtcatttccttagaaatgagaggttaggggccaggctcggtggctcatgcctgtaatcccagcactttgggaggctgaggcgggcggagttcgagactagcctgaccaacatggagaaaccccgtctctactaaaaatacaaaattagctggacgtggtggcacatacccgtaatcccagctactcgggaggctgaggcaggagaatcacttgaacccgggaggcagaggttgtgatgagccgagatcatgccattgcactccagcctaggcaacaagagtgcaactctgtctcaaaaaaaaaagaaaaaagaaaagaaaagaaaagaaaggataagtctgaagaaataaggagaaataagataacttgcttgagaaagaaacatacacaaacttgatagctatggagtatactagataatccataatacgaacactcaggtttgaggagattctatatagcagaaaaggcctatcttcacaaaactgctaatttgataggaagtctaaccttatctttatatggttgttaatgttaaagcatggaacttttaaaggaccttttattttgtcaaacatttacttaagcaaagcacactgctcagtgcctggcactttaaaatactcaacaaatattgcttttattgttccttttttttatactcatgggaaaactgctattttaaataatctgtaattgtttactatgtatttgcaagttaaagtatctaaatgtagatagattttggtaattgaagataaaataatagccctgaaacaggaaaagtgaatgtaaagttgatgtcttccagggctagagaggtatgatataagacagtaggggctgcgtaaaagtggagactgtgtattcaacataaagatattcaaattcactttgaaaaaataatcgaattttcaggtagccagacttgagttgagacaagcagtggatctgaaaggccatgagagaagtgtggaaatgttatagtgtaaaacaggggtcccaacccctgggccacaaactggtaccgggcctgttaggaactgggccacacagcagaatgggagaggtggatgagtgagcattactcctgagctcagcctcctatcagatcattggcagcatttgattctcacagaagcaccagctctactgtgaactgcgcatgcaagtgatctagtttgatccttatgagaatctagtgcttgatgatctgagtagtggagcagttttatcccaaaaccttccccccaaccctgtccatggaaatattgtcttccacgaaacgaatccctggtaccaaagaggttggggaccactggagtaaacaaaattaaggcagtattaaatacgaagatgtcttagatgttattttcttgcaagagacagaatcttatttaaatttccttagtaaaacagaggtttaactaaaaggatacaaaaatatcttgggctcagagtaaataagaaatcattagatagctgtttgttttatatctagttccaagtctgcatggtttctagttcccattcatctgtttatcatcttctccaatacagattaatttggaaggctgttagtatttgctccctttaacttaagtttatccatggctttggactgctgcgacaattctggcccaatgctattagacttctcagttgagatgcctataattaacatactaaaatacctcattttctaaatcaaaattttgagaaaaagcttcatgtattatatgcttctccttgagttacacatccattcctacttttctgaactgtaaccagaaagaacggtcatggggcacaaataggattgggtttaaactctctgctttatcacaatgccagactgatatttagagcctctacatgtggaaaagcttatgacactccttcattgtacagttcaaaacaaaattattttgaatctgtaaaaaaaatacatactgaatctaaacagccaattctagtttacaaagttctggataagaccattgtcttagtccattttctgttgcttatagcagtatacctaaaactgagtaatttacaaagaactgaatttattttctacagctaaggaggcttggaaatccaaggtcgatggggcatatcttttgagagccttcttgcttgtggggactctcagaagagtcccaaggtagcacagggtatcgtatggcaagagggctgagtatgctaacatgctagctcaggtctatcttccccttcttataaatctaatggtttccctcccaagataacctattaatccactgacttatcgatggattaatccactcatgagggaagaactttcatgatccaatcccctctttaaaaagctcgttctctatattgtcatattttggattaagtttcaacatgagttttggggggaacattcaaaccatagcaaccatgaaagctgaacctttccaattctgtgcatggatgtttatatctgatatcctaattgctgaagcacagtttcaacctgcctgttgaaaaagtccatttgcaacccagcacaagtcgatcacttgctcgagctaaatctcattttgtctctcaaacatttttcccaaattcatgtcatccctctgctaacaaagagaacaaaggtttgtagatgtttcctctcccaaagatagggtgaataactgctttaggcagagaagatcaaagtgtgaccttattgagcacttttattggcttcagactagggtttcaacaagttcagactcctgtggctgcctcaccatgtctaaagaaattatgaatgatccatctccttagtgtgattccccacccacccactccaatccagcccttctctctacctcttttcaaatatttctctaagacttttcttagaccaatatgacttccctctcacctaacaccctttctttagcaagttatatttatgtcagattcttaatccattcaaagggaatgatgataaagaataaaagaataatactaagtattaaactgtgccatcttgcccttctctctccctgagaatttttgctaatttagtagccaggggaaatgattgcaatatctcctagtgatctggtggcagggggagcatctggtttgggtgagtcagtccctgactttgtaatatgacctggtgaataactcaatatcaataaatttcaacctgctgcaggttgctgaagttttatagaaacttagaagagctataagccaccaccataaatttgagaagcaaccttaggctcagagaaaaaactggctgttatctagctgtgaaacaaaacacataataattatatagtgaaacaggacttcaaaagagaacttaggcaaatgagatttatgttcaacatttttgtggttaattattccatgttgctgcttaataaattttctaatttttaagaaatacaattcaaaaatgaaagttttgattatattgtagggtattagcacatgttcagaattttcagaattggagttctctgctgccctaactgacaatgacaaaatcaagggtagaaacttaagcttatgcttatttcataatgctggtcaaattcaattaaaattagtaatgtaatctttgagtggttactttatatttgtgttctcaagcagggacaattttacttttcaggggatagttgtcaatgtctagaagcctttgtgattgtcaaaacttggagaggaggaggtacactactggccagagacactgctaagcatcctatagccccctctgcattaaataattgtctgacccaaaatgtcatagtgccaatgttgagaagctgtgctctacattcttcttattcctttattaaatcattattatgtgtgaagtgactgttacataactagtagtaaacaatattttattgaccacttatcacgtgccatgctctattctaagaactacatacattcattctatttatcctcactatactacaaaatagggtaggctataattccattttacagatgaggaaattgaagcacagaagaggtaacatccacaatcacatagcctgcagaagatagatctggatttatagtcaggtaatttggttttagaagcccatccactgtggtaaaggaaatcaagtgctgcttattatttcccttgactttctcctatgctcttgcaactctaagaaaaggaccttggcaaatctcaatctacagaataattcataattctgggagctccacagaaaataaaagttatttatttatttatttatttatagctgttgcagtgttctgccacaggtatagtcaactttgtctgcaaagttaaaatttttaaaatgaaagaattaacaattcctcccctaattatatatatatataaataaatgtaggccttaacattaacacaaatcattgaagtttcatgggtcaaaaatttaggcagatatgtagttagtaggcatcttatactaattagttaacatactacttcttttatttttattataatataaactatattcattttataatatacataaataaaaatcaaatgctaaatataataaagtttattttatatagtccagctcgctaatgtacattaatgcttcaatgataatattaaagtttcttttattttattacatttagatgcaaactccagccagggttcacatattgatttcacgttctagtaaaaactacaaataaaaaactataaagtcagagattatttcttaatatattgcatatactttcatccaatgtaagtcatttcatgacatgtttagctttttttgtcatagtggtctcatgttttaatggaaaatagtatgcaacaattttgctctgttttagatgtgatattgaagtttaaaacttcactaataattgctgcaaatataacacaacaagagaaagcactataatctattgaggcaaaacataatattaagtaactgaaaatggcagaaaactatagggtatgataacaatgcaacatgaaaagcaaagagctttatttgtggtattccaggttgagggagacattcaaatgcctattaattcctatctctaccaatgatcacatttatatggttctgtactggcatgttccctgaagtctactcgtgccccattagtggtaaaagaattaaatatttaaaaatatttacgcatattatatttattagaaaaaaatactgacttccatttatgttgagaatgtcagcaaatccaatcaactcttctcagtatttccttttttctttatttgttgctataaccagagtccaagccaacatcatttcttgcttataaatgtgcaattatttcctactatctccctttgctttcatttctgctactttatgttctattctccccagagtaatcaaagggatctcttaagaacttgtcaaatcatgtcactcctctccttaaagcaactcatgccgcgcattcatttagaccatacccaaacaccctagtgtgacctgccccatgaatcatattcagacctcatcatttgtatctgtactcccaattcacttttcttgagtgaaataatcttttttgttgttgttcctcaatcatcgtgagctctttcttgcctaaggacatttatactagctctttctttttctggaaacatctttttcccaaatattgtggctaattctgctggaggttttcagcttaaatgacatctccttggcatttctcatgaagtaaaatacaagctccacaagacaaggctgcaggggaagttaggaagggactacttttttggttttgcattctttgaaataaagcattatgggcaacatattaacaaaataaaatataaaaggaataccataaatcttcattttacattttttcctacaattattttctatatacctaccatctgtcattttctatctatttgctaaaaatttctcagcatttccatgtaagcaacatgcatattaactgggttgaatcctctgtgtcagattctattttataatccagagtgtttcacttgcaccttttacttccttaaagtcctaagataaacagttgcaaagagtcagactctttgaagctctaaacatacttctgctctctccgtcctaatagccaaaggagggcttttctgcattttctctattcaagttccttttgcttttcctaagctttgtagtaaaaatctgcactcatgttctgccatctgcttttagtatatttttaattcacccaccaattgccattttactgattatccccagaaggataaagccatttttagtaaaattctgctttaaggggaattgatagttgtggagaaataactgcacattgttgaagagtatttattagaacacagttccattgtatttgaggagagaaatgcattactgactgcaatgtcttgagtcaagaatttagcaagtttttggaaaagactttcataaggtggaacaggaatccacattaagttcttgaacacataagattgagttgagcaaatcaatcagagtttgacaaagtaaagcgatgaatctagttaaggtaatgaaataaattaatcccacttgcctcatataagggtttgaaagcagaaataaatgcaaataaaggaattagaggtagagttacacgtagaattgctggctctataatggagaaaagtcaagaagaatttgagataaatttatttgttggacaaaatactacttacaaaagagttggagttggatttgagttgttaatatataggtgtgaatgtgtgtgtgtatatgtatgtatatatgtatatgtacatgtggattctagaggtctagaacttaaattgtttggacaaaggatatggatttttaccaagtgtttatttaattgcattctaacaaaataatattcttataagtgtatgagaaagaccttctcccctatatttacttggaagattaccaattgtattgacctttcctaatttaatagataaaataactacaataataaaatttttattgatgtacttacagattaaacagttttcatattttttatgtttttgtaaattgtctctcatagctattgccactcctcacctttttaaatgtttattaatttgtaaaaattctcttaaggacatccacctttgaagtaaatgttgcaaatatttcccaatgcatattattgtcttttagctttgtttataatgaatttttacatttttaactataagactcacaaatatttgttgcatcaaacttatttatgatttccacgttggtcatttttcaataggccttctcacccccaaattattattattttaataatggtctttaaaaatatcaaataatatatgtattagctattaagtacagttagacttttttactaatataataaaaatttgcaaaatgataaataataaagtaatggatgattgtacaatgttatgccaattttccataatgttgttctaatattgtaatttgctttctgtcatacagaatgtaattttacttacggtacaaattttaggtaagagtagattcgagtgaatgaaggctggatgaacagtgatactgtacctaaacacaggttctgtgcattttaagaatcattgcagacatttgaatactggcaaatctttgttatatttaaataaaattaatatatctataaatttagcttatattttttcttttatttttatttatacacatatgtatataatatgactacaaacagtcaaaataatataaccaattcccacatacacaccatttagtacaaaggataaacattatctgtaccattcaagtactctgtgcaccctgtcttaattgattttaccttcttccccctcaaaatattatcttgattttctctaacctgttgtcttaaacaggtcttgaaaaaactgtggctgggcacactggtacacctgcaattccagctactcagaaagctaagccagattgcttcaggccagtagtttgaagacaaaaagtgctgtgaaaaatgttggctaggcaaagggatttgggaatactagggaaaatgttagactgctaaatgggtggttctgacaggcttcattcatttttaacttttaagttcaggggtacaagtgcaggttcattacataggtaaacttgtatcatggtggtttgttgtacagattatttcatcaccccagtattaagcctagtaaccactagttattcttttgtatcttctccctcctccaattctccaccctccaaaaggccccagtgtgtgttgtcccccactctatgtgtccgtgtgttctcatcatttagctcccacctatgagtgagaacatgcagtgtttgatcttctgttcctgtgttagtttgctaaggataatggtctctaactacatccacatcccttcaaagaacaagatcttgttctttttttatgtctgcatagtattccatggtgtttatataccacattttctttatccagcagaccactgatgggcatttaggttgattccatgtctttgcttagagaaggaaataaaagggtgttccagagggaatacccagtgccaagctctggttcaggagtgtggctgggatcctctaaaactgcaagcagttataactgagagttcttgcttaaagtgtggtttatgttcaaccatctggttataactgagagttcttgcttaaagtgtggtttatgttcacccatctggttataactgagagttcttgcttaaagtgtggtttatgttcacccatgtggttataactgagagttcttgcttaaagtgtggtttatgttcacccatctggttataactgagagttcttgcttaaagtgtggtttatgttcacccatctggttataactgagagttcttgcttaaagtgtggtttatgttcacccatgtggttataactgagagttcttgcttaaagtgtggtttatgttcacccatctgggactatacttttgaagtctatacttttggaaggatagatgtttgattttttttttttttcttttaaaactagtaagtcatttttgttcagttttttaagtgtctattttatatattcaaaagtaagttgataatgctttcttgtgctcattatggcttaaatttctactatgtttataagtgctgaccctcttttcatcatcatcttgtgtcttttgatctatctccttctttttctctttacttggtaaacaatctggctggaaatttgtctatttaagtatggtttttaaagaatcaactttattttttattgtactgcttccttctttctctttgatatatttttacttcattataatttacacttattttgtgtgtttatgtttatatttcttatataattccagcttttgctgtattcaacagtcttcctttttatgtgcaatttttcactgtcattaagttctaaataaagtataacttctatttttatttttctttgagtcataaattacatgcaagcttctgtttaagtttgcaaacaacagcattatctggctgcctctttttattgggttctttcttacatttgggtcagaaaacatagtcagtctaaaacagttttcttgacctctaaacattttgctaaattcacttattcaaaattttctgctaatcagaatattatgtaacataatcagaacataccacattacactctgataatcaattcactagaaagatattgtcccttatgtattaaaatttgttcattttttggaattctcagaaatgtttttcaagaacactttccgttaacattttacaaaatttaaaaatgcaagtaaatttatgcctaatcgtacattaagtatgattttataagtggcatataaacagattgataattcctttcctagagtgtagagatgccctatgcactgcaagacagtcaagggaaggagttggtttggtttaggatgcgtgataaagcatctcatgaagtatctgtatgctcagttttagaaaatggatcccatttctaaaaactggattcattgactacattattaaattgtttcaatgctgtattccactatatgttgcattctatagaatgtttacttaacatctttggaataatcattaagtaaacaaaaactgtcccctcttcctcaaaactttcttttattcccatgcttatccactgtcatcaaattaccacatctgacagaaataattttaatttcaccatcaattgctaggatattaatttagactacaaatagctgcatataaacataaatgaaaaaatatttttccactctcgttgttgaaacagtgggagtcctgaatgatttgatagctgtacaattaatcaaataatagactactggattaaatctcagtgaactaaaaatatctgtgcatagctgtaaacaaaattaaattaatatcctcagtacctcttatgcctttaatgctatcaggatcagtagatgtgattttaaatgacgattcatataaataggaatatacgtaaaatttaaaaatactaagtgaatttatacctaattgtactacattattaagtataattttctgagtgttactcctaaccagtagcaaatatgttatatatatgagatatatgatatgtgtatatatgatatatgatatatatgttatgatatatatatgatatgtgatatatatgttactgggtaggaggtacagtagcaagttttctttcttaaaagaatggtatactctgggtctaagaatgacaaacagatgatgtggtggtcacttaccagagtattttatttatactgatctgtacccctagaatattcaaaaatgaggatgtatgagatatataatactttttattctatttttctgagttttccctcccagttaggttttcggaatacaaacatggagcagttacatgacataagggcaaatagtataagaattattacactttattcatttgtatcttgtatacttcctctattgggtaaatggatagatgcaatgaactgctaaataatacctgttgaatccaacctgagtgaaaacaaaatcttatgcctattgaaaagcatacaatgtttgtagtagggagaaaggaatatgatagatgtctgatatttaaatgtaaaaacgttggccgggcactgtggctcacgcctgtaatcccagcactattggagtccgaggcacaggcagatcatctgaggtcaggagttcaaaaccagcctggccaatttggtgaaaccccgtctctaataaaatacaaaaattagccaggcgtggtggtgcctgcctgtagtcccagctacttgggaggctggagcaggagaatcacttgaacccgggaagtggaggttgtagtgagctgagaccgtgccactgtgcttcaacctaggtgacagagcaagactccgtctcaaaaaaaaaaaaaagtaagaacattatatgctaacgtgaatgaaatataaacaattttcaattttatattatatacaatggcagatcatagctgcacctgtaagagaagatcaaattaaaatcggttatctgtttgtttattctcttatcagtgcctggctttctagaaaaatttagctattttcatggaattctctgataaacattatgaactcatttctttctataatatgttggtaatattggccgtatataataatttagaatctcttattctcctttatttttctcagagcagtcattgccatttgacatgttatattttatttttgttagtttcctattttaccatacagctaattaaaatgaacttttcattaattcaattactgttcttttcactgttatagcccaagtatctaaaacagtgtctagcactaagtagtcaccaggtaagtctttgctgagtgaataaatcttagaaggaaaggagagagaaaatctagatcctttatagtatccatggttttctacaaacaggtagaatgtaatattttattattttgcaccatgtaagttagaatcattgtggaacatcacatttatacaattcttattagactatatctagatctcttttaaaataagcaagcaagcaagcaaacaaacagcaatgaagatacgctgaagaagttttgggaggaggacctacatctttacagtttcacccacaacttacccataccctccttcaatgaattcctagggcttcttagaaaatagtggatgcaattcaggaagtgtttgttttaaaacaccaagaatgatgactgtccaaattcagaatgtgttcatgtattccatagacaatgactgaatatctactaggttctgaaaaatgtactagttgctgtggtggataaaataataataatacactgtaagacagtcaggggaagaggttggtttggtttaggatgcatgataagatatctcatgaagtatctatatactcaattttagaaaatggatcccactcttaaaaactggattcattgatggcattatcaaattgtttcaatgttaaatttcactatctatagtgttggaatattagtccagtaacaatatgaaaccaaagatacatcactatccagtaaggcagtttatattattaccacatagtacaatgtgttaacagagatcaaagataaatgaacacttccaacataaaacgtataataatttacttcaggtaacatatttttaaattatgggtataattatgggcataatcataattactacttagaaatgtattatgtgtatcatttaacattttatatataacattttgaatttttaaaatatttatgggtccttgttgttaaaatgaagtggcgttccagaaatagttgattgtagatttgttgcacgtaaaacagagaaatccagcatttataggtaacaccacagttaagaggaaagaaaactaagaaaattgcagtagaatacttttgtgaggaaaaaatgaaatgtcaaagataaaatttttatggttctttaatcacaatcatcaaattgtaacaaatggaactttaaaattgaatttgtctcttgtctgaattacacctgagattatacctgcacaccaagtgaagaatcatatttcaaaatgcatttcatttggcttttaacacagttattctgttgaagacatttctgtaaagcttgccagatacaggaaaagcaatttaataaacactgtgatcaaataactactcaattgttcttcatcttttttaacatttaacaccttgcagatcattgctacaataaagtgtgttatccccttttcacaatgattcattaacctgtattaattgttctttacaaagttgtttttatacatcttactaactaccaatgtgaggaaaaggtctatgttgctttcattcagtagaaaacacatgcactttaataatattgtttcttaaaaaacacctattggtttgttttctttcagtttctcatttatcatcatttgttcatcttcactgaaagctgaacatatgcagcctaacaacaacttgaattaattgaatgtttcgtatctattctccaaattaaattttcagttttgctcaccttttcatgattatattaagaaaatgtagccataattgcttgtatgggaaaaattactgagaaagacattcagattaaatgtaggaaatgctctaaggatctttgaaaggaaagaaatgtcaggttctatattgtattcaaggaagataggagatgaaagtgtcagatatgcaaggcagataagaaaatagtttttaaaaataagtcatagacattctttttctgatagttattgaaaaatcctgttcatcaaaagatatcttaaatcaataaagatttcctcaacaaccagacaaaatcgttctgtgtgtgtgtatgtcttattggaactgtaattatatttacaatactataattagtcgtgttattaactcttgttactcactagaacattattggtaataagcagtgacatatcttaaagatttttcttgtgtcccagcgtctgcccagtgattaatatgttcagctccataaatgtttattcaacgagtaaattagtgactaggtactaagttcttattcttgtgtacagtcacctatcaaatctttccactcttctctgggcaattggggaagctatgtatagaaaatggaagagtctctgtcagcctgggttactaagggtgaacctgaactttctctgagtgaaaaaaaaatctattttactgagccacagagatttggatattcatattttatagcagtattaactaatacaaggtatttttaacctttaaaagaaaagaagaaaaagtagaagtgatactaatttcccagatgccatccaactcctctttcaccaatagatagcattgaaaggcgggaatcagtgcctcctcctagtgatagtgcctcagttgagcagggcttattccgaattcagtatgcaacatcccgacagggcaaatctagggattgctctcaagtcactatccaacatcccgatgggttgaatggcatgccaaacacagcaataagcactataaaaaagccaggccgccccggggtggggccacgtggcttcagaccagagagcggagctaccttggcccaagcgctgcagctgcctgaaccccggggcttcgcagccttgcttgttttctctgaaccgcaataggatggtgttcacagcgattcaaagggtggcattgggttggacgttttggttacgagccagcctattcccacattgtacgtgaatgtttaatgtgctctcaaaacatggaaaataagtttagtgcacatagctaaatcacaaaacatccgatttctgtttcctcaggaagtcattactgcgccaccacatcacgtgaccttaacatgatcaatgtatttctctgccttgacatttaaataaactatataaattaagataagtagattagaaaatcattcaaattataccataatctgtacaaatattgtgtcccctgccaggcaagggacagggtgccggcgacggccgcgtggccaaggccccgcaggaaagctcccaggtctccctcactctccaggtgccctttgcacccaacagtgcgtgtgaggaacgaactgctgtttgaacgtcccctgagattgtgcgtagccccgtgtaaatgtaatagcctccatggcttaattggctatcaagcgaattttcccagatgaaagcaatgttgggttaggggacgacggtgcagccacccagcctttaccagcagcgtgctgcagacgaaggcagtcaaggtgtggaggtgatcacgcaggtacatgtttttgactgtttaatttgaaagttcacattttttatgctttgcgttgatgtgtaatttttgtactcttggtgactagtttttgtcaaatcttttttggaatattgcttaaatgttttgattttatgatagtgaagcttgtattcagtgttttgtcaattaatattttatgctagtaaaaaaagcaaaagagaaaaaaaaaagatcttagtctgtttctaaggcccagaccacacaaagtatccattttcctctcttgtctataaaacaaaactcaccttatcaacagtttctgttctacccaaagatgttaaataaagtccaaggtagtgggatgggggaagtgatgttttattgtctatggcacgtgtgttcctaggacctataaaaaggaaagcaggtaaatgactttgatctgtttgataaatgatttttatcttgagtagtgtagtcacttaaatatgttgatcctccttctgggtggaaattatttcaataccatgttgtttttgttattattaactatatattattatgtatataataatacataaaagttataggaatgaaataaaaaattattgaaatcctaacacacagttgtagctatttttcattcatgtatttattaaatattattaaattattcaccacataataaatagtaaagcattttccacataatcatatctaccgttttattcatggaaatcattttatttgattatttaatatttattttagattaagcatgcatgtgtacatttgttacatgaatatattgcatgatgctgaggtttgggcttctattgaacatattatctgaatagtaaacatagtacccaataagtagcttttcaaaccttgccttccttccttcccctgttttggagtccccagtgtctgttatttccatccttttgctcctgtgtacccaaagtttagctctcacctataagtgaggacatgcggtatttggttttctgtttacatcttaattcatttaggatgatggcatccaggcacatctatgttactgcaaaggaaaggatttcattctttcttctggctacatagtattccatggtgtatatgcatcatagtttctttatccaatccaccattgttggaaaccaatgttgattccatgtctttgctatttcatatttgcaatataacatgcaagtgtgcagaagctctttagtttaatttggtctcacttgtcaacttttgtttttgttgcttttgtgttttagtacttagtcataaattctttgcataggccaatatccaaaagagcttcttaggtctaattctaggcttcttatagtctaaagttttacatttaagtctttaatcaatcttgagttaatttttttatatggtgagagacaggagtctaatttcattcttctgaatatggttagccagttttcccagcaccattaattgaatagggtatccttgccccattgtatttttatcaattttgttaaagatcagttggttgtaggtatgggacttcatttctggattctctattttgttccattggtctatgtgtctgtttttgtacccaaaccatgctattttggttattgtagccttgtagtatagtttgaagtcaggtaatgtgttgcccctgcctttgttcttttagcttaagattgctttggctattcaggctcttttttagttaaatacaaattttagaattgattttctaattctgtgtaaaaataactttggcagtttgataggaactgcattgaatttgtagattgctttgggcagtaaagacattttaatgatgttgattcttccaatccataagcatgtaatatttttccatttgtttgtgtcatctatgatttcattcagcagtgttttgtagttctacttaaagagatcttttacctccttggatagaggtattcctaagtatttcttttttttttttttctgtggctcttgtaaatgggattgtgttcttgatttggttctcagtttgaatattgcattgtatagaaatactactgctttttgtatattgatttcttatcttaaaactttactgaaatttttaatcaactctaggagtctttggtcagaatcattagggttttctaggtatagaatcctatcatcagtgaagaaataaaatttaatttcctcttttcctatttggatgccttttgtttcttgcttttgtctgatcattctggctagggcttccagtattaagttgaataagagtggtgaaagtggatattcttgtcttgttcttattcttatgggaattcttccaacttttgcctgtttagtataacgtagactaggtttgtcaatagatggttcttattattttaggtatgttctttgaatgcctagtctattgagggttttaattatgaaggcatgttggactttatcaaatgttttacctgcatctgttgagataatcttatgttttttttcattttaaattctgtttatgtggtgaatcacattaactgatttgcatatatttgaacaactcttacatcccaggtataaagttcacttgatattgtattatctttttgatgtgctgctgaatgtggtttgcaagtactttgttgaggattttttcatctatgttcatcagatatattggcctagggttttgttttttgtgtgagtatttgccatattttggtatcaggatgatataggttttgtagagtaagttagaggagaatctctcatcctcgattttttggaatagtttcagtaggattggcatgagctcccctttgtatgtctggtagaattcagctatgaattcatctagtcctaggcttctattacttattcaattcattctgtaattcattgttggtctgttcagtgtttcaggttcttcctggttcaatcttgggaagttgtgtgtttccaggaacgtattcatttcttctaggttatctagttgtgcacatagaaatgttcatagtagtctctgagaatcttttgaatctccgtgggactcgattgaatgtcgcctttgttattgctgattgtgcttatttggatcttttcttttttgttaatcttgcttgcagtctatcaattttggttacactttcaaagaaccaacttttcattttgttgatcctttgtgtggatttttgagtctcgattttattcagtcctgttcttatttttgttatttcttttcttatgctatatttggatgtagttttttttcttgttttactacttgctctgggtgcaatgttagattgttaatttgagatatttctatctttttgatgtaggtatttagcactataatctttcctttttaaactgctattattgcatcccagaggtttttgttcattgtgtctctattttcatttgtttaaaaaattctttgatttctgctttaattttattgtttacccaaacaaaagtcattcaagagtaatttctttagtttccgtgtgtgtttgtgtgtgagtgtctgtgttttagagttcctcttgctattgatttttatttttattctactgcggtccaagaagatgcttgatattatttgattgtttttatttcttgacacttgctttataactgcatatgtgatcactcttagagtatgttccatgtgaagatgagaaaaaaatatatatattgtggttgttgggtagagtgttctgtagatgtctattaggttcaattggtcaagtggcaaatttaagtccagaatttatttgtttagatttctgcctcaataatctatctaccactgtcagtggagtgttgaagttcccagttattactgaggggctgtctacctcttaggtctagtagtgatttctttatgtatcgtgatgctccaattaatattgggtgcatatttatttaagatagttaattattcttattgaattgagccctttgtcattaagcaataacatttttttgtccttgtttctgtttttggctgaagatctgttttctctgatatgagaatagaaactcctgctcttttatgttttccatttgcatgattaatctttctctatccctttactttgaacccatgagtgtcattagttgtgagatgggtctcttgaagacagcagatgggtgattctgatttttttattccaattcgccactgtatgtcttttaagcggaggatttaggccatttatgttcaaggttaacattgatatgtgagattgtgttcctgtcatagttttgttagctagtttctttgcagtctcaattgcgtagttgctttatagagtctgtggactatgtacttaactgtgctttttctgtgtattgttctttcatgtccacatttagaactcccttaagcatttctgcagggctagtctagtggtgataaattcccttaccgattgcttgactcagaaagactcaatctctccttcgtttatgaagcttagttttgaagaatatgaatgtttatgctggaatgtcattccttttagagtactaaaaatagacctctaatctctgctggattgtaaggtttcttctgagaagtccactgttagtctgatgggttccctttgtaggtagtgttgctcttttctctagctgtgtctgagatttgttttttcttttgtgttaaccttggatagtctaacgactatgtgtcttggggatggctgtctttatagtgtataacagaggttctctggatttctggtgtatgcatgtcaacatctctagcaaaattgagaatattttcttgaattttttcctcagatatgttttccaagttggttactctttcttttctctcaggaataccaataagttgtagaagtggtttctttacataatcccatatttcttgaaggctttgtctttttaaaaaatattttttctttatttttgcatgactgggttaatttgaagaatcagtcttcaagctttgaagtgtttccttctgcttggcctagtctgtttttaagtctcccaactatattttgaaatttatttagtgaatttttcagttccagaagttcagtttggctctttcttaatataactatgttgtctttcaaatcttggactgtttttctggtttctttgcattggatttctattttgtcttatgtctcattgactttccttgacatccatcttctgagttctatgtgtctcatttcagacatttacatctggtcaggatcctttcctagggagctagtgagaggctttggagatcacaaaacactctggctttgtgtattgccagacttcttgtgcttattcctttccatctgcgggagttgacacttcttttttgaatttgcttcatttagatggggtttgtattagtcagagttctctataggtaccgaagtaataggatagatgtacatttgaaggggagtttattaaggatcattgactcacacgatcacaaggtaaagtcccacaataaaccatctgcaagctgaggagcagggaagccagtccgagtcccaaaacctcaaaagtagggaagctgacagtgcagccttcagtctgtggctgaaggcctgagagcccctggcaaaccactggtgtaagtccaagagtccaaaagctgaagaactggaagcatccagcacaggataaagatgaaagccaggagactcagcaagtctgctcttctgccttctcctgcctgctttgtcctagccgtgctggcagctgattagatggtgcccacccagattgagggtggttctgcctctcctagtccagactcaaatgttaatctcctttggcaacaccctccaaacacacccgggaacaatattttgcaccctttaatacaatcaagttgacactcagtattaaccatcacagggcttttatattttttattctctttgaaagtatgacagtggtgtatgtgattgattggcttcatttctctgtagttgcagagggtgaagtttccatatatgttccttggttacagataggttgctgcagtggctttcacagatgttgcttgttttagcaatgtatttttatatgatggtataactcaaacttcagtctggtagatggacttaagagtaagagctggcaggtggggtcttggtgcatgcttgccctcactggagaatcatgagaaacaacttctttcagtgcacgctttctgggcccctatgggaagagctattgttgcatctgcaacagtgcactggggaggggagatggaggcgagacataattccttctccaagtctggttctgggccttggtggtgctcctttcagtggcttatgccatggccacattttctttgtctcatgtggtgctttggcaggctgcactcccccttcccttagggatggtccacactgaggattacatctctagggacacacaactctccagagacccaccagtccactgtgcttaccaaagtcagagcaggttttagggtatgtctgcagttgctctgatgatgcagtatttcaagggtagaggatctccaggcagggcagtggcacaatgggtgcaacaccagtatggagtctgcagcccatgattttcagcccagcaggcaaccatggagtctgcctagcttacactcccctgacccagcagatctcccacagacactcgccctggcggcaagcccaaccaactaggctttccccaagccatctgctcccacattgttgagctgctccaggcattctgtgccaggacactccctgggaaagaagctaccaccatcaggccatacccttcatggtctggtcttgcaaagggaggggtgtccagctcccatgcccccatgagaacccataccacacccttctctgcattctgactatggaggatcctccttcacttgagattaggttacaaatctcagctcagtgtccctgggtggtatacttgagtcttggggagttgggactgggctcacggatttgtcctctggcctctaagcttcaagcactggctgtgacttggggacagggtggtgagcttttcccaggctgtcaacaaaacactcaagctatgcagtggatgctgtgctgtggacaccctcttgcaggcgtgaccaggcatgagctctgggaaggggttgacaggcaagggggcatgtggaccagatgcaacttaatcacacagcactggtgatggggcctatcttgggcatgtgagcaggccaggcgcggttcactcccagcctggcggacagcaggaacttagccactcagtatgaaatggaggcttgtgggatgggcacctagggttgcattttgctgcagctgcacagcacaacaaagccttctgggctctgtgtgggttcaaactgtgcctctgcatgtgctcgaggcagctctcctaccagtccaaagatctatgagggtcgtagaaactcctgtaactaggatctcagaggtacattatgggtatgtagtgtcccagggttccttcactcaccccttccttgggtttgttcagggtatatgggccagtcctgatgtctagtgactctgagcagactgtcccatttcttccctcttcaaccatggtgtctgtgtcacctctgtgtcaactttcagtgttttctctcaaaagatctgtttaaaatgtgaaggtttactagatatttgggttcctctccatggaagaggcacttcccaactgcatctccttggccatctgccattctccaaatcttttttggtgcctatttttcctttttactttctgtgcttcctccttattctcttcctccaacactgatatgtactctgacattcaattctaaatatatatattataaaaaatagatataatgtgcatatatgtgttcattaaggatagaatacttggctgggcacggtagcttatgcctgtaatcccagcactttgggaggccgaggtgggcggatcatgaggtcaggagatcgagatcatcctggctaacacagtgaaaccccgtctctagtaaacaaaatacaaaaaattagccgggcctggtggcgggtgcctgtagtcccagctacttgggaggctgaggcaggagaatgtcgtgaacccgggaggtggagcttgcagtgagctgagatcatgccactgcactccagcctgggcgacagagcaagactccatctcaaaaaaaaaaaaaaaaaaaaaaaaaaattcagaaagaaggttactacatctgaatttctgaagatggttttagtagggatgaattcaatgtaatccatggattattcatgactttgtagaaaggttaatgaatgtttcttttagccactcgggttgggacctctgaatcaataggaagcataaatgagagatgtcaggggaggattgaaggatgctgatggaggtgggaaggcctgaagtgacccgcctgtgctagactgaaagtgattcaggccccacccaaatgcatgagcagtggagcctaaatccttcacaactgcacattagaggagagaggatttgaccatcatcctgcaattagagttactgttaatcaaggtaggaggacaagatgcgttcccacttctgactctgattgccctaaatagaggccctgagtggtaataatttgttttgaaactaggagacagttcagtcagtgtttcatcagattcatgttttgctgaaaatactggcacattcctccatttaatgaggagtcaccacaggtaactcaagggccttagtcctgctgcccacataagggagttctggtcctcaggaaatggggccgtatttgaaggtaacgaaagggataagatgagacatgatggtgtgatgagtattccagtgactgcttttggtaaatttgggctggcatgtgggtttcagttcctctgtctagaaaggaaatgctcctcatgactgacaaaagcaggaataggttttatcatcagctctacaccaaggctctccagttactagagtggtctctagaagacagcattatcagcaaattccattagcaactaacttgcttctgtggtgctgtgttgttgttaatagttttaattatagcagctgcaatgcagggaacctgatccaaaaaaggcacaaaccaaaacctgtgctcctaaggagattataagaaatgaaatcaccaacactggcctctctttgggaggaaactggaaatggcaagagggaccactcatgggctaaagcccagcacttgggtcacaactcaccctggagaggccaagtatgggccccattgcttcaggccttggctgtggatcacaccctggattcttctcttccaggtgcagctcagttgccgtgatgctccttgagtcaatgagctctttggtctgctcttctgctcaagcagaaaaggattggcacttcacccttgagaagctgacaagaaccacaggcttcttcaggcaggtggtggaacatgggtgtatcctgcaggtgctcacagtatctccctttgctcaggtgacggaggcttggggttttccagctcttgacctaaaattcctgaatgattgttttcaaatttcttaatgaataataggatgaacttgccacccctgtcaggggggaatggggttcctgaaagctgagaggccaggatccagatcctgagcctcttcaccaagcagatgctgtagagcaaaggcagcaactatctatctatctatctatctatctatctatctatctatctatcatctatctatctttccccttccctttaaggaaatcctcaggactaggtgagatcttagatctagtggagaatctgagctgctccaagcaaaacctcaggatcctgcaatctgaaaaggtagaaccaaggcaaatgtgggcagcaatacccagaagttgggtactgagcctgttagggagcatttttttcaggggagtgaagtaaacaatgaggtgtagagagcagcgagaatgagaagccaaatcacagactacaaaatcacacagcatctgtcctttctccctgggcagagagagtatgatgggtagtctccaatatagaaagcccattgtgtccttcagctcccccatacagtcgcagaacaagcctgattctgaaatttctattctctttaggctctagcctgattttctggctcataaggccaaagggagctggaaaagtccccacggcaggactcatggtggagagagaatgatctagaggattcaggcctctgcatactgtgtctgggtccctccttaaagaatgataaagacaagtaaagagcttgaagcagcctggagtccagccagaaacctttaactgagctttaaaggagatggtcacaacacttttcagaatactggcaaaggcctcctgtggccaggtttgtcctgggatgagcaaaatttaatgttaacctgctgtatctttgcttttaatatatctgcttgcccatcacaatgatgttatggttaatttcaccaatttggtaacctgcctcttgggaagtacgaaagtaagcaagggccaggtgtggtgactcacgcctgtaatcccagtactttgggtggctgaggcgggtggattgcttgagcccaggagttcaagaccaacctgggcaccatgacaaaaccccgtctctacaaaatatacaaaaattaaccaggagtggcagtgcatggctgtaatcccagctactcggaggctgaggtgggagaatctcttgagcctgggaggcagaggttgcagtgagctgagatcacaccactgcattccagcctgggcaatgaagtgagaccctgtctcaaaaaaaaaaaaaaaaaaaaagagagagaaagacagtgagggtgtcctgtgaatcaaatctttgaatggatgttttcttaactaaccaagacctctgtaagaattctgtctttgattccacaataaagtggtgtgaaattactataagcaaatgtttacatgtctcatttaatcttcacaacaatcctatgaggcaagtagaattgttatcctcattttctgagcgatgaaactgaggctcaggggagggtgtgaccttgccaagtccccacaactggaaaccacggaacaaaatgacctgagtcacacatgctagaaaaaactcattgtgcctccccatggagattcacaatggctatttctgttgcaatagaggatgaagcaggtggtctttccaatcaacagctgttaagaaaggctccagttctccccggggaatctcagaatcagactgaagattcagaagagcctttgctgaccactgagtcaaactccccagaatccttttgtagtaccgctgaccagtgagtgatcatcaaacctccaaagacttcggtaatttgcagattctagggaaaattccatgagttaacagaggtgaaatttgaaagttccatagagaaattctggaacttgaaattatcataggaagattattatgcaatttcgttcctgttagtagtctttaataaagagacttcaggtgaacattgggttgaaccaagattactttctcccattgtcaccattctgatttcagattgttccttgctggtttatatcctcttcaattccattttgtaccagatagaggcagagtagaaggaaaaactgaacaacaaaccgcatttgtgccagctcgagggataaacaccctctaaggagcatctcaagctttccacaagatttcaacagggtcaccccagttcacagccaggtagtgtgtcttcaatgtgtggccaatcgctgttggacaaacaggaggtgttttccccaggataccctgcactagactcggcatcttttcagtcttcttcttattctgtctccttcccagcacactgacactggaagcacactaagtcatcacatgagcaattcacaggtgccatgaaatacctcacaaatgtacagtactttaactgttgaccccatgtattaggtaagaaagatattattatttacatttatctattggaacttgggggcacagagtgtttaaattacctgcccaagggcacacaagtcactcgcctcttgtgtttcaattatacaatggcttagtgattctttctttcagacgattgttgtgaggagtgaatggaattaaatcaagtctatgtggaaagggcctggagtatgagttctcaatgcagggtgactactgtcagcaccaactagttatgataatgaccatgatgatgatggggaaataataacaccttgaagtaataataatgaagttagaacgatacccccaaatgtatgaaaattacatctataaaatgagttagtttataaatcgtgagaaaatgggcatcctcaggtattgcaggtagaaacacacaatggaataactcttgtcagcaagctaatccatttccaggaatttttattttttttttttttgagacagagtcttcctctgtcacccaggttggagtgcaatggcatgatcttggttcactgcaacctctgcctcccaggttcaagtgattcccctgcctcagccccccattagctgggactacaggcacacaccaccgtgcccagctaatttttgtatttttagtagagacgggatttcaccatgttgaccaggatggtcttgatctcttgacctcatgttctgccagcctcggcctcccaaagtgctggaattacaggcatgatcaaccaccccaagtccagaatttcctaacaaggtctcaagagatgaaggtgctactgttcagtgaccccctgctcaaaaacactgccctaggagatgggggctcttctatgccccatttttacaggtaaggctagtcatggaagtgggagatagaaaataaagggtggggtcaggttcctttctaaaaacctaaatgcatgtcaggcaagtagggcttagaaaagaatttaccctccttcacctctgtcacctcatccctccttccaacctccatcacttgtgtggcaaactggactcggagccagaaggcaccagaaaaagtggaatgtgagcctgcaggccatcaaggtgaagccctgaggatcccccggggccagtccctccactttgatgcggataagcctcagctagtgtcaagttgaaaggagaaaaagacaggtgagtcactgttaaagaaacaggttcacatatgtaggtctaggagcactgcaagtagttcttacagtgagagagagcaattgtgctcaactctgaatccagcacaaggaagtggtaattatactcaaggaggaggatgggggttagcagataggaaatgactatgagggaacatgaagggtaagggaggattctggctaaactgacctaacgagattctcgctgagcacaggccaaggttatctgacatcagctgcgggatggtgggggatgaggaccctgatcagtatatggtggacggggattcctgccagctaaactgacttagcagggtaatttcctaaaactgaattttacaaaaagtgcacagatgggtttagcagaaggttcagaagcctgaccaatgtacggtcaagcaaacaatttctgtcaccacacagaatgcatgctccagggaccatactgggcctcagcatcttcctaccccaccagcttccaggagggcattttgccctgggcctcctgggtgtttccttgcctgatcatttctaggagacaagagacttgcactttatcatctaggataaattcagtgtcagatttttaagcctaaatcggatgacagtgcttcagtgacaatctcagttatttaaaaagggaggttcattcattcaccagttctaaaggtgcacataagacattcttttttttttttttacaaaaaaattgagaccaagttaaaagaaaaagaatgaaaaaaatcaagcaacccgaatcccttatataatctcttcaaaaccccaaaccagggaaatcttctcaatataaacttgggaattttgttgatcactgactgcagtctggtggtttatacttattttcttgtgtcccgtttcctcccttctcccacccccagcccctcagcaggtgctgccttcctgtcttggtctcattgtcctcaaatcagacctgcaggtatggtcccaagtgcttctaaccttcatcctcatatccacgggatcccctgagaacccagcttctgttattgagaactgtcccacctgctgactaaggagtctgatctttattcagaatcattgctaagataccagaagaaataacatgtaagagtctagtatagaactcacagttctgatctgaggaactaacaattgcttatttgaatcactgtatttcctatttatattcttttttttttttttttttttttttttttgagatggagtctcgctatgtctctcaggctggagtgcagtggtgcgatctcggttcactgcaacctctgcctcccaggtttgagccgttgtccctgcctcaggctcctgagtagctgggattacaggcgcccaccaccatgcctggctaatttttgtaatttattttattttttttgagacagagtctcactctgttgcccaggctggagtgcagtggtgccatctcactcactgcaacttctgcctccctgggttcaagcaattctcctacctcagcctcctgagtatctaggattacaggcgcctgccaccatgcgtggctaatttttgtatttttagtagagacggggtttcgccatgttggccaggctggtctcaaactcctgacctcaggtgatccacccgccttggcctcccaaagtgctgggattacaggtgtgagccaccactcccggcctatattcatatttctattcacaatatctcctacacagtgttttcctgttctatggggagaaatcaggcagatagcagaagacacaggtcagatctcaggaagagtttctatggcctccaaacaagcatttattgattatagatgtaggggtgaatattacgaatatggggagatgtcccacaaggttagctcctatgctacctaatgcaccaggcagcttgtccataacttagtttaaatatatctgtcaggctccatgcccatttgctgtaaaagcaagattactgaggtaatcttagattttaaaatggaaaactgggcctcacaaaagcagttgggaaaattacctggagattgtttctaaggcagtgcccaactgtaccaagcaaaggacaacaagtacaaagtcagagcttcattaacttgatgattgattcattcacttacttaatgcaagacttcaggggaagaagagtcgctgagtggaggagacgggaaacaatgcattatgaaacgcccatggtctctggatacccacccagccagtccccaccctcctagggtctggtctcgaccatctcatcatgtgttttgagggtgcgttttcctaccagttgtttttttgtctttgagacagggtctcctctcgcccaggctggagtgcagtggtgcgatctcggctcactatagcttcaaccttccgggctgggcgatgctggtgcctcagcctcccgactagctgggaccacaggcgcgggccaccacactcggctaatttttgtatttttagtagagaaggggtttcgccagggtgcccaccctgttctcgaactactgggctcaagggatctgcctgcctcagcctcccaaagtgctgggattacaggcatgagccaccagcaacacgcccagattcttctacacccttaattgggaggtaaggcttctgcttgcaggctgtgcgttcttccagccagccgcacctttgctgtggactaaacaggaaccactggattacagtcctctggctctctgccctgcaggagattttaatcaaaaattctaggcctaagggaaaagcagggttaagctgaaaatgcacacagggctcctgtaaatttcttttcataaaccacccgcccagggcattaaatagggtacttagttgatccgaaccctccagggagacctccgacccttctcttcgtagcccccagctcccctcccccggttccactgaggcaaggggactgagctgctccacatgccaggagtcagcacgccggaaggccccgcccagcggctggcgcagccaatcgcagagcgggcaagtggtgggggcgggcctgcctgggcggcaagggggcaggggggtctaggggctttagaggtcaattagctgctttcgggcggccttaggcgacaggagactcctggacccagcacctgcccactgtgcctgtccacctgtggctacagcagctgagaccccagtgggctaagattggacaggggccaccagggacccagcaagtccttcagctctgtgagtgagggattttccggagtgccaggccgcagtattcccagggccggtgggggtgggacagggaggctcgaccccggcaaatcaggcagaggcgccccttgctccctgcaacatcgcccacgtcctggggccacagtgagcatgagcggagggcgggagcaagagccaggggacctggcctgggtccccagcccaaagcctgggaagctgcctacccacccctgtgtgggcgcggacactggggactctggcttccggtggttcggccacctgattcagtttatgctctgtgaggggagctggagtgttggcaggactggcccacctgcaggactgcaggactgcgggaacggcggtagatgggtgctctccttcccagtttgtcctgggaagacattcaataactgtttcattacaaggggcatttggaaaacatacttcaccttctgttgtgtattagccaagaacaaggtgtgatgtgacttcccaattattggggatccctttgtcccttcttgaaattagatgtcttcattcttgaggttttgcctggatgacctcagcacaattggtacaaaacctgggccaacggtttcctagtttcccggttgttgccttaagcttctcgcccatcaggtaccttcctgtccttttcgtagcctgtcatcatcatcccagaaaactgtttcaactcctacagctctggacaggctgcttttcattttggtgggtccctccaatacctccacttgccctgtttttctccagccacatccttggcctcttccacagtccttaggtaaatgcttggaagaataatttaaatatttttattctaccatggtggccctagtttctcagggggtagtaaaatggctttttaggatcggtctaatcagatcctcatttcttttcccttcctagatttttgaaacatgaatccttcactcctcctggctgcctttttcctgggaattgcctcagctgctctaacacgtgaccacagtctagacgcacaatggaccaagtggaaggcaaagcacaagagattatatgacatggttggtggcatctgaaactgtccaggggaacaccagagagatgggcattgctattgggatcatatggccagagagtggcttctagaggctggctcctaccaataagctaacacaataacttaatagcactgattatgagcacgatatgggcatacacccttgttgtgtctcagcttggaaaacatctcctagaagtgtcaagccttccctggccatggttactcttacatctctgtctgaagattcacttggttagcatatgttgggttttaattagaaataaatagcattggcggggcacggtggctcacgcctgtaataccagcactttgggaggccaaggcaggcggatcacaaagtcaggagattgagaccatcctggctaacacggtgaaaccccgtctctactaaaaaaaaatacaaaaagttagcatggtggcaggcgcctgtagttccagctactcgggagactggggcaggagaatggcatgaacccaggaggcagagcttgcagtgagctgagatcgtgccactgcactccagcctgggtgacagagcgagactccgtctcaaaaaaaaaaagaaatgaagaacatcagttacatgtttgcctttagaatgaagaaggatggaggagagcagtgtgagagaacatgaagatgactgagcagcacaatcaggaatacagccaagggaaacacagcttcacaatggccatgaacacctttggagacatggtaagtatgctgtgggctgcccagctctgtgcttcccctcctcagttctttaccaaattaatctcttgcttcttaacattttatttacttttctttgaagaccactgaagaattcaggcaggtgatgaatggttttcaataccagaagcacaggaacgggaaacagttccaggaacgcctgcttcttgagatccccacatctgtggactggagagagaaaggctacgtgactcctgtgaaggatcaggtgagactgtgttaggttcagacctcccatcaccccaggaaagccaagaagcaattgacatttgtgctatggtagactgtgcagcaacatgcagttcactttttttttttgtataatttttttgtttgtttgttttgagacagagcctcactctgttgctcaaggttgagtgcagcggcgtgatctcgcctcactgaaacctctgtctcccagattcaagagattatcctggctcagcctcccaagtagctggggttacaggtgcctgcctccccttccagctaattttttgtatttttagtagagatggggttttgccacgttggtcaggctggtcttgagctcctgaccacaggtcatccacctgcgtcggcctcctaaaatgctgggattacaggcatgagccaccaagcctggcctgtttttttttgtttgttttgtttttgttttttttttttgttttgttttttgagacaggtcctgctctgtcctgcaggctggagtgtagtggtatgatctcgggtcactgcagcctctgcctcccaagctgaagccatcctcctgcctcagcctcctgagtagctggggctacaggtattcaccaccactacacccagctaattttaaaatttttttttcgtagagacagggttttaccatgttgcccagcctggtcttgaacttctggggtcaagtgatccgcctgtctcagcctcactaagtgctgggattacagctgtgagccaacacatgtggcccttcatataattttgaccttttaaaatgtattgagaattgttttgtgacctaacatatgatttatcatggggaatgttccatatgcacttgagaggaatatatattctgcacttgttagatggagagctttctatatgtctgttaggtctagttggtttagtgtgttgttcaattcctctagttccttattgattttgtctagatgttctatttactgttgaaggtggggtgttgactgggcgcagtaggtcaggcctgtaatcccagcactttgggaggctgaggtgggtgaattgcttgagcttgggcatttgagaccagcctgggcaacatggtgagaccccgtctccacaaaaaaatacacaaattggctgggtgtggtgctgtgtgcctatagttccagctactggggaggctgaggctggagaattgcttgagtctgggaggcagagattgcggtgagctgtgatagagccactgcattgaggtctccattattgtaaaattgtttcttccttcaattttattagtttgctttgtgcattttggagcccttttttttttggttcatatgtgtttataattgttacatcttcttgtgatttgactctcttacgaacataaaatgtttttctgtaacagtttttggcttaaaatctattttgtgtggtattattagtatagccaccctggctctcttttggttactatttgcatggattatctctttccatcttttcactttcaacaaatttgtgtctttgggtctacagtgagtattttgtgagttgcatatttggattatgtattacattattaaaaaaattgattctgccgatctttccattgatgagattatttacattgaaagtgattactgaaacagaaaagttacttgaccgggcacggtggctcccgcctggaggtgaggctgcagtgagccatgatcgcaccactgctcttcagcctgggggacagagtgagattgactcaaaaacaaaaaacagaaacttacttatggttggactcacgcctgtaatcctatcactttgggatgctgaggtgggcagattgcttgagcccaggagtttgagaccaggctgggcgacatagcaagactcctgtctctacaaaaaatagaaaaataagctgggcatggtggtgcacacctgtagttccagctactcaggaggctgaggtgggaggatcagctgagcctgcggaggtcaaggttgtagtgagccgtgattgtgccactgcactccagcctgggcaacagagccagaccctgtctcaaaaaaaaccaaaaacaggctggatgcagtggctcatggctgtacccagcactttgggaggccgaggcgggtggatcactagaggccaggagctcgagactagcctggccaatgtagtgaaacctcatctctactaaaaatacaaaaaattagctgggtctggtggtgggcgcctgcaatcccagctactcaggaggctgagaatcacttgaacctgggaggcaaaggctgcagtgagctgagaatgaaacactgcactccagcctgagttacagagcaagactctgtctcaaagaaaccccaaaaaagaaaaacagaaaaacccacacaccaaagaacttacttatgtcatcctgctgtttagtttctacataaagtgttttgctcctcagtaccttcttttgtgtttggttaatgatttatcctgtaatattttgatcctttcttagttccttttctgtatatttttaaagttttgtttttagtggatactatgaagatttcagttaacatgctgagttctaagtctagttcagactgataccaactcagcttcaatagcatacattaactctgctcctttctctgtcccctagctatattgttacaaattatgtctttaaacaattagttcctattaacatagatgcatattatttcatgcatgtttttaaatcataaaggagaaagaggaataacatacccaaaatacaataatactagcttttatatttagctatatagttgcctttaccagtgatttttattttttcatatagctctgagttattatcttgtatcttttcattttagcctgaaggactcacttcagcttttttttttagcccgagtcttgctctgttgcccaggctgcagtgcagtggcacaatctctgctcactgcaaactctgccttctgggttcaagtgattctcctgcctgagcctcccaagtagctgggattacaggcacgtgccatcacacacagcaaatttttgtatttttagtagagatggggtttcaccatattggccaggctggtctcgaactcctgacctcaggtgatccacctgcctcggcctcccaaagtgcagggattacaggcatgagccactgtgcccagccaagcattctttttcttttttttttttttttgaggtggagtttccctctttttgcccaggctggagtgcaatcgggtgtgacctcggcttactgcaacctctgcctcccaggttcaagcaattctcctgcctcagcctcccgagtagctgggattacaggcatgtgccaccatgcctggctaattttgtatttttttagtagagacagggtttctccatgttggccaggctggtctcaaactcccgacctcaggtgatccacccgcctcggcctcccaaagtgctgggattacaggcgtgagccaccacgcccagaccaggccaagcattcttatatttttattcatttattatttttttagtgacaggttcttgctctgtcaaccaggctggagtgcagtggtatgatcatacctcaccgtaacctccaacttctggtctcaaacgatcctcctgtctcagcctcatgagtagttggaactacagatgcacaccaccatgcccagctaatttttttaatttatattttgtagagacggggtctcactatgttgtccaggctagtcttaaactgctggctgcaagcaatcctcctgtctcagcctcctgagtagctaggaccacaggccagagccaccttgtctggctaattatttttattttgtagagatggggtctccttatgtcgcccaggctggttgtggactcctggcctcaggtgatcccacttcagtctccaaaagtgctgaagttacaggcatgagccaccatgctgagcttccccaaccctgtttttttttttttttttttgagatggagtcttgctctgtcgcccaggctggagtgcaatggcgccatctcagctcactgcaacttccacctcccaggctcaagcaattctcctgtctcagcctcagtcagctgggactacaggtacatgccaccatgcccagcacaccaccactgccttctatactccgtgatttctgataagcaactgttagtcttactgaagatcccttgtacaggatgaatcacttatctcttgctgcttttctgtctttagctttctacaatttgattataatgtgtgtcagtgtggatctctttgagtttatcctgctttgaatttgttgagcatcttcaatgtgtagattcacaattcccatcaaatgtgggatatttttggtcactatttcttaaaaaaatctctctaggccaggcacagtggctcacacctgtaatcctgcactttgggaggctgaggtgggaggattgtttgagcctgggagttcaagactggcctgggcaacatggtgagaccttgtctctccaaaaaatacagaaattagctgtgcttagtggtggtatgtgctatagtcctggtgccatattcccagctacctgggaggctgactatagctggtgctatagtcccagctacttgggaggctgaagggggaggattgcttgagcctaggaggtagaggctgcagttatcaatgagccatgagatcacaccactgcactccaatctggacgacagagcgagaccatctcaaaaaaaaaaaaaaaaaaagatagggatgtatctgcatgactatggattaggcaatggtttcttacatacaacctaaagcacaccaaccagaggaaaaataaattatgctttctcaagattaaaaaggagactatcaagaaagcgcaatgacaactaatagattgagaggaaatatttacaaattatatacatgataaaggtcaattacctagaatatatatacttcaaagactcatttagagacagggtcatgctatgttgcctagactagtgttgaccttctgggctcaagttatcctcctgcctcagccttctgagtagctgggaccataggcctatactaccacaactggctgtggagtatataaagaactcttaccactcaataatgtggacaaaacccaatttaaaaatgagcaaaggctttaaatagaataaaaatgaaacatttaagattgttgaaagtggttgcctctggggagtggaatatggtgaggcagatgtctggattggaggggacgagctattgtgaacaataaaccttgtatcactatttggctctctggatcacagttcacaacaagggatgaatttgctccacaggggacatttggcaatctgaatatatttgtcattgttataactgaggggtcttcctgacatctaatatgtagaggccagggatattactaaacatcctacaaggcagagagagcccccataacaaagaattacatagcctaaaatgtcaatagtgctgaggtgaaaaattgtctaaagtatgtttgaggctgggtgcggtggctcatgcctataatactaacactttgggaggctgaggcaggtggagcacctgaggtcaggagtttgagaccagcctggccaacatggtgaaactccatctctactaataataaaaaaattagttgggcatggtagctcatgcctgtaatcccagttacgtgggaggctgaggcaggagaattgcttgaacctggaaggcgggggttgcagtgagccaagatcccaccactgcactccagcctgggtgacagagtgagatttcatctcaaaataaataaataaacaaatgaagtatgtttgataaaaatacaaatacaagtcaataaaagttatgttaaaaaattaaaaaatcataaaacaatcttttgtacaatatccacagatttacttttctttctttctctctctttctttccttccttccttctttctttcttgcttgctttctttcttttttttttttttttttttgagtttcactcttgttgcccaggctggagtgcaatggcacaatctcagctcaatgcaacctctgcctctcaggttcaagcgattctcctgcctcagcctcctgagtagctgggattacaggcatgtgcctgcttagtgggggtataagccctccttaccaagtagagaaaaaggggagaaaatcacattgctaaagcaattgtgttaagccccatattatctttacttgtggaagaatgcagctttgacctattattcgacacttagcacatataaaattttaggccttagctttcagttcctcagatcgtagcaaattgaagtgttaggctaacaaattagcttacaggcaataacagaaatcactgactgcactactactgacggctacagtaagatctctgataaaaacatgttaagtgatgctcactcaaatccgtaaaggtgcagaaatactcctctcaaacatagtaaaaataaaaacaatctaattatcttgtatgtcaattaaatgaactatggtatacctatgcaaagtactaaacagccattaaaaaggataacatatgcatgtaaattacttggaattatcacaaacatacatatggaaaaaggcaggtttcatacaacatgtataacatgttcccacttacaattttctttctcttccccattctttctccccaccatatatatattgtttataactttctatattatttcaactgtataatagaaactcatctttacaaaaagaaaaacacaactttaaaaatggttaaactattaggctggatgttgtggctcacacctgtaatcccagcactttaggaggctgagagtggatcacaaggtcaggagttcgagaccagcctgaccaaatggtgaaaccccgtctctactaaaaatacaaaaattaaccaggcgtgatagcaagtgcctgtaatcccagctactcgggaggctgaggcaggagaatcacttgaaccctggaggcggaggttgcagtgagctgagattgcgccagtgcactccagtctgggtgacaaagcgagactctgtctctcaaaaaaaaaaaaaaaaaaaaaagaggttaaactattaaaccattatgtccccccataaaataattaaagttctttctaaggactgtactcaattcttcctataaattttactttttagtcgacggaatcagtatactgtaatgtttttctttaactcaggggcccaaggcctagataatcaacttctttgaacaagatgtgatatattggatacagggctggtataagacaactttgaaatgttcaaggactgctttttataccccaaccctctccacctcccacctaatctgtaactctatgtcttagcacccttcccttagtcaccttaaaaatctcatgaagtcaacaaggacaacaaaaaacttaaaaacagaaaaaatctcatgaagtctaacctacccaaacctatccttcatgagaagtctaaccccacacagcacttggaaggattaatgccatattctagcctcatccactgacaaaagggctctctggtgctctccagctcctgtttgctcactttccattcctttagtgacatacctctgctggaggtcagtaaaactttgtttaaccactccttttctcccaatgtacaaatgacaaattggtcccgaatctttctagaggcatctacgaaagtattatgcttgctttaggattaagtaagcttgttacctcaaacaacaattccaactaggctggggcagtggcttacacctgtaatcccagcactttgggaggctgaggcaggaggatggctcgagcccaggaatttgatacaagcctgggcaacatagtgagatcccatcttgattaaacaatatattttaaaaacaaaaaagctggctgggcacggtggctcacgcctgtaatctcagcactttgggaggccaaggtgggtggataacgaggtcaagagatcgagaccatcctggccaacgtggtgaaaccccgttgtagactaaaaatacaaaaattagctgggcgtgatggcacgcgcctgtagtgccagctattcgggaggctgaggcaggagaattgcttgaacctcagaggcagatgttgcagtgagccgagatcacgccacggtgcaccagcctggcgacagagtgagactgtctcaaaaacaaaaaacaattccaattggagaagggctctggcaagtggcaagtctgaagcacacagtttgtaaatcacaaacatataatgataaaatccttctcaaaaacagtctatacatgttaaacatgaaacagcttcacccacccaaaacaaaatcacaaggtatcaattattaggcttactagttttctgctccatacaaaactaatgtattgggatgcacagattacaagtagctcctgaataacagatacgttcttcttttttttttaatttttatatttttgagacggagtttcactcttgttgcccaggctggagtacaacggcatgacgtcagctcactgcaacctctgccttccaggttcaagcaattctcctcccttagcctcctgagtagctgggattacaggtgcccgccaccacgcctggctacttttttctatttttagtggagacggggtttcaccatgttggccaggctggtctcgaactcctgactttaggtgatttgcctgcctcggcctcccaaagtgctaggattacaggcatgagctaccgcgactggcctaacaggtaaattcttatatagagagcacggtctgaggcagaagttcatcttttttaaaaaagcaacttttctaacagcatgtgactatagagtaggagatgaaagggtaattttggtgcacagagatataaggggatgagaagggtggagacatcagggtcctgcagaactttacataggtgatatttacactcacacaagggaatgaacaccgacctttcaaaagcttttccaaaaacagaagaggaaggaacactcctcaactcattccatgaggctagaattgtctggatacaaagactagacaaagacatcataagaaaaccatagatcagtgtcacttagaatagcattaaaaggaatacaatacttagttgtaagacttctacaatgagaactacaaaacatcattgaaagaaatcagagacctaaataaatggaaagacatctcatattcagcattggaaggcttaatatggttgagatggcaatactggtcaggtgcagtggctcatgcccataatcccagaattttgggaagctgaggtgggaagattgcttgattccaggagttcgagaccagtctgggatacgtgatgagaccatgtctctacaaaaaattaaaaagttagccaggtgcagttgcgcacgcctatggttctagctacttgggagggtgaggtgagaggattgcttgagcccaggaggtcaaggttgcagtgactgctgcctggtactccagcctgggtgaaagggcaaaacccttttggggagggtggggaagatggcaatactccacaaattggtgtgcagattcaatgcaattcctatcaaaatcccagcctctttttttttgttttgttttgttttgtagaaatttacaagctgatgctaaacacacatgtgataggatcagggctcaggctcaggtctgagcctcaatctgacactctctgtggagtgtcaggaaataacagataaatagcatcgaatttgaaggtttgccgagaagtgagagaaaaaactccctttgcctgcctcctaggcttcaaagctgtctgggccaagacgtcaatttagctgcatcatgggtcaatgaggcctttgcgaattaggcaaataaatcaagttactagagtttaagctgtgttttctttcagtattccaatgaatcactttttgacctttggaattattaggtacttgtcaagactgataaaatttagctggagatattgcagatatgggcgataaatatgactgaataaagtctgaaaccattcaagactataaaatgtgtttgagatttaggtgaggaggaaagaccttttgaaaattatgaaggctattaacaggctgaacatgacttcaattcaccatatctcagaatcggtaggtactcctataaaagtgtgagtgagatagttcactcatgttaataggctcctcgtaatgatgcacaaattcacagtagtgctgggtatgcggcacgtcaaaggcccaaatgccttttattatgaaagacaggccaaatctagtcaagttttagagttacctatacttactgtatttctatattaggttatttcatgacatttatttcatgacttttttcctaaaaatgaatctgaatagctttatttcttttctctttcttcttgagatgtggtcttgttttgtcacttaggccagagtgcagtggcatgatcacagctcatggtagcctcaacctcccaggcttaagggatcctcccatcttagtagttgggaccacagccatgcaccatcacgcttggataacattttcattttttgtagagacggggtctcgctatattgcctagggtggtcttgaacttccgggctcaagtgatcctcccacctcagcctccaaaacctccaaaaatgctgggattacaagcaccagccaccatgcccagactttatagtttaatttcataggcatttgtccatggtgggggaaatgctgagaaagaaagtagagaaaaatacactttatttcctatttaagtagaccttattttgtttaactatactgatactgatagggcaagtattatattattaagtaactattaacattctattaactatactgatagggcaagcattttattaaataattatgtatattctattcaaacaaattagaagccttctagattaaaaatatatgtatagaaaggtttaaactgcctgaaaattagaaggtaaatgacaaatatttacatatcataggaaagaatgttcagatcacacacaaagaacatataaacacagataatagtaagatacgaagacatcaagcaaacgaagatcagtgtcttcaaaaatgttgtatgtttggcaaaagctcctatcacaaatagtaggaggccgggcatagtggttcatgcctgtaatcccagctctttgggagtctgagatgggtggatcacccgaggtcaggagttcaagaccagcctgaccaacatggcgaaaccccatctctactaaaaatacgaaaattagctgggtgtggtggcacatgcctgtagtctcagctacttgggaggctgagacaagagaattgcttgaacccgggaggtggaggagattgcaccactgcactccagtctgggagacagagtaagactctgtctcaaaaaaaaaaaaaaaaaaaaagatttttttagatgttcccactttatgccaaaatctatgtggctacacataccaataaagcccttctttgctagctccatggtgaacctccttgtgatcttttccagttcgttatcctgtaaaataagaaaacaataaaaataaaaaaagatacaaaaatcgcttgagattatagctagcatcttattttctatttatagtacattttcatgtcttctcatccttagaacaactcataaggtaggcaatgccattttaaaggtgagaaaataagggatcaaaaaagtaggttataaaaacaagatagtagaaccaggactcaaattcccattctattaattccccactgaaaaatataccaaatcttaattaagattaattgtaatataattatattccatctaaatggtgaattttaaagagaataaaaatcatatctgtttatgtttgtatatagataatttagtattatgtaaagcattgtgacaaccagtttgaatttacttggaactgacaggataaaaagtaaggtttttattggcttagttaagatatttgtcactagcatgagatcctgaactaaaaacttcagatcacagtactacttttcttctttctttttgagacagagtcttgctctgttgcccaggctggaatacagtggtgaaatctcgtctcactgcaacctctgcctcctgggttcaagcagttctcatgcctgagcctcccgagtagctaggattacaggtgtgcgtcactatgcctggctaattagatcacagtgattcttttttttttttttttttgagacaaagtctcgctctgtcacccaggctggagtgcagtggcatgatctcggctcactgcaaactccacctcccgggtttactccattctcctgcctcagtctcctgagtagctgggactacaggcacccaccaacacgccggactaatttttcgtatttttagtagagacggggtttcactgtgttaaccaggatggtctcgatctcctgacctcgtgatccgcctgccttggcctcccaaagtgctgggattacaggcgtgagccaccgcacccagccagatcacagtacttcttaaatatgggtataggtgtctaataatatgaagatattaattaccttttaaataagaaaataataatacaaaaagcaaaaaaaaaaaaaaaacaagactcataaaaacaaaaccaaacaaagcagaaaatgataaaggatatagatattaagtaggtgacctttatatggcaaaacactcaatgagttaattctttacttttttcattccatttgaaaagcaatggggactattgatttcactgatatgggggatacagagaagcccagtaatttcaagtccttcataaatgcactgtgtgcacaaatatcactttgaggccgggtgcggtggctcatgcctgtaatcccagcactctgggaggccaaggtgggcagatcacctgcggtcagtagttcaagaccagcctggccaacatggtgaaaccccctctctactaaaaatacaaaaattagtcaggcatggtggcatgcacctgtaatcccagttactggatcaaggagaatcgcctgaacccaggaggcggaggttgcagtgagccgagatcgcaccgttgcactccagcctgggcgacagagcaagactctgtgtcaaaaaagcaaaaacaaaaacaaaaacaaaaactttcatacttacggtatagttcttgggatagatcttaacaccagctttagcacccccaaacggcacatctgaaagagaaggttgatggttgctattccatataaaggttaaaaaagtaaaatgacagaaagcgccacacaatattagaaaaacgtgtgatgctttaagcttgaatttctgaaagttcaagaaataaacctaccatcgttttctcaactgtactttaaacaacatttattgaacaggaattgttcaataaaattggctagccaagttctaatatatatatataaaacataataataattaaccaataataataaatacttaaacctctaatccatagattgcaaatgcaacaatgatagcttattttcttggggaacaagagtgggtggggacagagggaacgggaacaggacttttgctgaaaggagggatgacaggaacacagggctgtgggtgaaaagaagaacaaatagaagaaacagcagagaaggcggctggctggggtggggcgggcgcctccctggccctgctccaggactcaggactgggtcccgcctgggccgcccctcctgccaagcccctggcctcttcccagggtgactggcccactcctagaccctaggacatctgaagggcaggagtcccaacggcctgagagggtatgggccaggagcagcaggctgacccatctgggcccaaaagccacctgtgtttgggggctggaatgctgtctagaaagagggcgccctgggaaaggggcgcacgagagtttctctcctgagaggcccccatgcaggtcgggtcaacaagggggctttatctgccttgaggcagcgctccctaagtgaagcaggcctaccccagaagcacgggggcttggctggcgcctgaactccctgtgcaaggcagcacctgctcatggagcccctcagcctgcaggtgcacacctggtttccaagtcctgcctggggccttgctaggtgggggacggacctggaacaggaccctaagcccaccccctcctcatacctggcagtccagggctccccgcccagtggagccagcacaggctagccaggcccccctcctgcctgacccccggaggccaagctcctctcctgcagtagtgccgccctgccagtcaggtagctctgggggcaggggcaaaggagaagggagggccgcagccctctgggaatggcctttctgaggcactcagtggctggactggggctctggcaggagttggggcattaataacacccccatcctcccctgggctccgcctcatctgaccctccagaaccccctgccccaagcccctacacacactgttctattcctcagcccctctcaacgccctggcaccatggggcccaatgcatgtcctcccctgagagggaacagctctggggcaacgggcagcggggtgccctccctgccaccaagatttggtgcctagagctggtggagggctggccgcacctctctggggcacaccaggtcctgctcccccagcctatggctttggggcggagcccgaagggagagagcaggggcggtgggtgggggaagaagggggtttctgcggctcagtttgtggcaagaaagttttttttttttttcaactttctcttgtgtaaaaagttcacgaaagctcggcagcctctgcaaatgtcagcagtgttttctggggcgggggatcagggaggggccccaggcctggcctgcaacttgcgactgaaggtggcctcttattgcttagaaacgtgtgtttcggtttaaataccagacagtaaaaatagagctcgaggaccacccgcactgttgccaaatcagtgccagaatgaacagcttaaataaataaaaaatcgaaatatttacttctggataaaaatcgcagtaaaaccatttgcctttctttgcattatatataatatatatttataactgcccagctgcgggcggcggagccgagggcagcggaggggtcaggacatctcgatgacctccacgctgcccgagaagctcccctgcttgcccagggcggccagctcctcgccgcgcgcgcgcccctccaccatgccctcctcgaactccatctggcagctgcagcacttgaagtgcgaatccggggccagctcgtctgaccagctggtccgcgcgtcccgggctcagcccttgctgcctcccgccgtggcaggtcgctgcagccgttgggttccggggcgcccgcccggccgaagggcgcaaacagcaccctgcccggcccttgcacgccctcggggctgaagcaccgaggacgcttcagggagtcgagcggtggcgtccaggctccggggctggccggctggccagggcccggcagccgcgtagccgaagttcaggccgcgcgcggggtagcgcgccgggccgtgggcgtgcctgggcgcggcgtccgggcagggcgagggcaggcccagcatggccccgactggctgtccagctttcagagagcttcggggcctcgccggggtcgctgggcccgggccgccgggccgcctgctgggggcgtaggccgacttgatgtccagagagaaggagggcttgaggcggctggtgtcctgcaggtggtccgaggagaggcgcaggctgcgcaggccctgctgcagcgtgctggtggccgtggggggcgccgggggcttcctgcccgcgctcgggccgccctccctggcagctgcactcctggtggcagcggtctctgaggtaggtggtggcagccatggcagtggggccccggccgcagggctggggggaggctcctgcattcctgagggggtgcccgcgtcgccctgcacggcggccagcagcttcgggctgctctggtcctccagcagctggcccaggaagttgaagttgggcgagatggacgggcgctggtccttcacaaacctgtaggcgtcttcggaggacatgcccatggtcttcatgatgtaggcgatggcgatagtggcacagcaggagatgccggccagacggtggacgatgacttggcagctggacagcttggctttatcgacgaactcgatggacttgtccagccagggcagcagcttttcacagtagttgtcgttgatggggacccgcaagaagtggctctggtagatgaagtcaggcttggggcaggagttgctggcatagaggacgtagcttattccattctgcgtcatcagatccttgttcaggacgtcttcctgcgagcccaggtagaggtgaggcaggatgagggtcaggcccacgctgggcacgagcaggcaggactgggagaggctcatgggtagcagggcagcaggctcacccttgcagaggtcggggaagcaggaggagaaggtggcgaagccccccgtgatgatggccatgctgtggaagcagccggccacgctgtggaagcagccatccagcttggtcagcaggatggagaggaagctgtctgcggccgcgtgctctggtcatagaccaccacgtcctgtggctcagtggcctccacctggctgcgtgcggccggctggatgaactccacaatggtcaccttgcccttctgcaaccgccacttcaccagcttggagcagcagatgttgacggagctgagcacatgccagctgttgtactccaggaaggagtgactgtcgatgaccaggcccccccaggcccgccccgcagcaggctggccagcttcttggcgtccatcaccttcctggggagccggtccccggccatgatggggcaatgggtcttggggagggtgacccctgaagtgaggaggggctgctccgacggcccaagtgtggcctcgcactgggaataacctagcacatgatgccggaccttgcttgcgctcacctcgggggtgctccgaggacccgcaccgcgctcaaggcgcccgctcggctgtgcagtccatgggccaggcgggggcccgcgcagctggggcgggggctggggctctaatatatatttaatcagtgctcttcaccactttaaaaagataatagcttatttactctccttctactataatttggtcttatttatagaatatgttgaggaattgaaaacaaagatctagacttaaaatccaattagctccctcccgtaaaaaaatccctcccgtaaaaaaaggctatatcttaatttagagtaattgagaaatgatgcaggtcttaaagagtacaacttaaaaaaaaatcagttccgataaggtatatttctatagcatcttaacagtaacatgtttgtaaacatatttccccagagttctcattaggtagcaagaaaagcgatcacctaccaaccactgcacacttgtatgtcatcagagaagccaaagcttttacttcatctacactcacatcagtgctataacggatacctggtggtgttttttaaaaaatgtgttggggtgggtgagaaagaaggggatatatttagaacaaatttcagtaagtttcaaaaaagaaagctacaaattgaaaatatccactttttacattttatacccaagctatgtccaaaaacacttgaagcagctcatacatcagaacaccataaaaaatgaatataaaacatttaaaaaagctgctaataacagtaactatgatttcacaagacaaaaatcaccctgcaatgaatttctgtacactttccagaaggcttttttatgttccttttacctttggtttgcgtgacctggttgcagggagttcaagaattcagcttgcttttttagggggtgggtaggggtgggaaacagggtcttgctctgttgctcaggctgagcgtagtggcacagacactgcttactgtagcttcaacctcctgggctcaggtaatcctcccacctcagcctcctgagtagctgggaccacaagtgcatgccaccatgcccagctaatgtttgaattttttgtagagtcaagatctcaccatgttgcccaggctggtctcaaactcctgggctcaagtgatcctcccaccttggcttcccaaagtgctgggattacagggatgagccgctatgcctggcaagaattctgctttctgataattcacaaacatgggcaatgaatagtcaccaggttcaaaataccgtatgtctaaactgaggttttggcttcaaatgggtatattgaaagagatccttacctgttattctcctcacccactgccaacctctttcaatttgaagatgagaaagccattttcccttcctgaggttgagtgattcccttcaccacttctgcaagaaggggaggtagccaagcagacaggtactagtgcccctgtatctagtagccattacgtgttggtatagggtatacagaaagtggcgatgcccactgctttggctttggggggtcttggtcaattacccttccaagttttggagtgctaagccacctttctttctctataatccattgcttctcaatcccaaggaggaaagtctgagcagggttgatgtttgactgcacagtgcttggggcactgggtgtttgtgtgtgaagtttacccacaagaagctgcagcattttttctaccctcccactctcaacagattcagcccctctcgaggggctgggtacgatttccactgggagtcacaggtaagtaatgggagcctcagggacagctcttttaaagaattctgagaataaaagtttttcagatagaaaatatacaatatctcagggactggcagtttgagagaacttccctagtcaattttaaaagctagcttttttatatgtttctgaaaacatcaaccttaatattaacaatattttaagagaatgtatttattatacagatcataaagagcatattctaagctgaacatacttatttggtctactgtaaaaacaaatcatatttagaggagtatgtgcttacaactatatcttatacataattgattctcaaattgtgaaataaatgtactcattaaacttttagaatgcaaaattacaggtaatttttctagcacacagcagatatctgtatagctgactcccccatctcattcaggtctctgttaaaaacttcattctgagaggctctccctgaccactgtatttaaaagagcacctctttctcactcccactttcctgcctctcctaccttacttgtttcttcatatcgtttattattactgactttgcattatacatgtgtttagtatctggcttccctacctggcaagttagcaccacgagggcagactttgttatgttcactgctttaattccttgttcctaacatagaaaatggcatacattaggcactcaaatacatgctgaattaatatacgaatattctgactcttaaaatttaaaaaagaaagaaaagctatggccacaaaaaattttgacatacatgtacttttaaataacttaccataagcctccatacatatcatgaaaggactcagtatacaacattggggatgggggtgatggggagatgatggtcaaagggcacaaagcctcaattagacaggaggaataagtttctttgagataaattgcacagcatggtgaatacagtaaataataatagattacacatttggcccaacatggtagttcacgcttgtaatcccaacactggaaggctgaggtgggaggatcacttgagctcaggagtttgaaaccagcctggccaacatagtgagacctcatttctacaacaacaacaaaaagtactgcacatttcaaaatcactgagtaaatttcagatgttctcaccagaaaaaatgataattatttgcaattgtttccagtagtgaacaggttaatcagcttgacttaattatgtaatgttgtattcataaatcataaaattactttgtacctcataaatatatatctacaatttgtcaatttacaatttaaaaaataaaaaaattgaaaggctttccagtcagatgaggcccacagaaaaggaaaaaaaaattgtaaataatattaagatgaatcctttgtatcttaaaaaaaattgagttgggtgtgggggcatgtgcccgtagtcccagatgctcaggaggctggggcaggagaatcgcttgagcccaggagttgcaggctgcagtgagctacgctcaggtcactgcactccaccccagcaacagagccagaccttttctcaaaaaaaaaaattgttttaacactaaaatgtgcttttcaaattattcaaaatgcttctaagtaataccacatatttaatgataactacactaagccaggaaaatagtcaggcgctgtgcccaggtgacccagcctgcaccatccgcttgcatggaggggtgctaacgccaccctcctaggatgggcgtcacaactgcgaggaacatcgcacatggggaatctggcacggtgccctgcaagtggtcaaacaggcaaatctcaactgttaccactgctataacaagtattacaaagcaatggcatgtaacaaagcaattaaaaagtctaaactgacaggagtttgaacaaatgacttaaaccttggtttcattacttctacataaattcacgggaagtggtaaaacaatgtattaattaagaactagtatttcttctcccacacataaatcacttttttcattgctcttttagagcctgtggaagtcatcactacattatttttaattttcctggctttcttaagtggaggaaaagttattttcttttaacttagaaacttaaaaattttaacttgcatttagcagggagctaaaaactgctggaaccaatgatattcataaatcaaacagaagcattcaaatggcaagcctaatattctagaaatagatgttactaaaaattaggaaccagacctctccttccacacaacagtgtaaacagaatgtccattttatcataagtcatggaatgatatgggtcagaaactgtgtgtgtataacaagagacatgttccgctggatggaacccaggaattcttgtttgtaaagttaaattttctttcccagctacacccatttagagagctcaacctgctaaacagtgaagagaagcagtttcacaaattacctctcacaccacaggcattttctgtaggctatgaaccaataaaggttcagtgaatggaagtacaggaggagctataaagaaagtaccagcttagtggaagaagccctggagccaacagagtagggacaaggaggggatagaagtgaatgcaagtgatattgcctgggctaaagaagacacattttcattttaaatttctagttaaccagtgatacacacgtttttaattctagaaattggcaaataccgagtactgggctacctaaactgttaatctgaaaaacaaaaaattttaaagtgcacccattaataaaatactctgcggcaatacttgagacaaaacaatctccaataagacacaatgtacccacaaacagaaaaagccagttactcttccttctctgggtttggaaaccaaagataactatcaaaaatatactgtcacctgaaaattcttaactacattctaaggcacattaagagatttaagtaaggaggctggatgtggtggctcacgcctataatcccagcactttgggaggccgagctgggcagatcacttgaggtcaggagttcgagaccagcttggccaacatggtgaaacccccatctttactaagaatacaaaaattagctgggtgtggtggcatgcttctgtatttcctagctactcatgaggctaaggcggtggttacagtgagctgagattgcactactgcattccagcctgggcgacggtttgagactccgcctcaaaaaaaaaaaaaaaaaaaaaaaaaaagtaagactccaaaaaggaagttactctacttaatggattgggaaaaaatagcacaactggagaatgtgaaggacaaaatgatgtgacatatacatacaaagttctgaaaggcagggaaagcttagccctttttaatgcccattcccattcaaatatactcaatttgaagttattcaataaagtcaaataataggtaaatacatatgcatacaagaaaatcagaaaatcttaaaatatttaatccaaaatgaagcaagaaggatcttatgtggtctgaatattgtcactttttataaaaccaagcctttcctccttcagcagagaaggctgaaggtgaacaggaccaacagagatcaaacaggggcacagaacagaaactagggggaggaaggaagagatgttttattccagaaatggaggaaagtaaattatatttttgtatcccaaagtcttagagggttaggcatggtggctcatgcctgtagtcctagcacattgggaggctgaggcaggagaacttgagctcaggtgtgcaagaccagcctggacaacaatagtgagatcccatttctacacacacacacacacacacacacacacacacacacacacatcttaaaaccctgttagactccattgatgcattactagtgtctgggatcaactgagtctttggtcaactgtgctagtaggaatgaaggtaaatacttttaacaaagagcaggagtccacggctggctaagctagatagtgaatgggctcggtacacaggtgtcggccacagagctgatgccattagacacatggcctaaaaatcaaggccaccctgctgacaaagtaatctgtgcatccagctcaccagaggaaactgaagacacaccacccatgacgtttattatttatctatctcagtaaagctggaggaagggctagggacagaatgacgtatgtactacaatgggaacttttaaatcattccttctattctgaacagaaaccaactaaacagttattttatgttaactggtatccagatgtttccaaagaatattagtgaaatgcagacatctgcaactatacacagcacaaagcactgatctgatttttaacttaattaccacagatattccttagtatgctcaagtctaatgagcagtgcatgctaagtttctctaggagaaataaaaatcaaaagcagaaactagcttaagttgctacagtgatgaagaaaacaaaccagctcattactttaaaaaagattcagtgaaaaccacaattgactaagcttgaatttttcttccttttcctagctgactcaaaagcaaacacacaaaagcctccagctagagtcactgttttttttttataattaatcattaacaaaacatttatgaaaatccaaatggttttaaaattacttcaacctggttctcttaatagggtttgatttattcatcagaaatctgatttccagctgtactctctcacttttcagcaactatttataaaataaccaagagttctaccacaagcacagaacccccagaaaagcaaaaaggcctcagaacaactcttaatattcatacgttaacactcttgccacttactcatcagatcatattttttcacttaatattaatgtactttctaatccacaataatgtagcgtaacttaatttaaaatgaggagaggaaggttagaagcagggaggaactattaatgaccacccgtaagtaatgaccatctgaaatactatgtctcagataaaaattcagacattcagcatggggaaggagcactgcatataggagctaagaaaaagtacacactttaggctgggtgtggtggctcatgcctgtaatcccagcactttgggaggctgaggcgggcagatcatttgaggtcaggagttcgagaccagcctggccaacatggtgaaaccctgtctctactaaacatacaaaaaaattagctgggcgtggtggtgcacgcctgtaatcccagctactggggaggctgaggcaggagaattgcttgaacccaggagacagaggttgcaatgagctgagattgcaccactgcacttcagcctgggtgacagagtgagactccatctcaaaaaaaaaaaaaaaaaaaaagaaagaaaataaaaattatactttaattgctttagcagcatcaatgtactgttctgtataaagtaggcaaataccatcttagatttttaattcattgtctaaatcttttattttaacctgaataaattttgaaaagacaactaagctttctgggaagcaaatgtttagctgatattggaaaaatataatgtagtgacagatcaagaaaaaaaaggaaaaatactttttttcattaaaaatttaaaattataatacatatgtatgtatttctgtcaaaattgaaatacaaaaagaaagctgaagactcccttgactaccacttgtgaccccagtcttctctaagtgtatatccttccaaatcatattccctgcagttatatatgtacatatccataaaacatacagctttcttttatgttaggtatttaacttacagcctgatggatggaagattatgcattaaaagggggatcttgttaatttttttggtagattcttttattctgatcttgattaacagtaaacttagttgcactttcacaccaaatacctcttggaaacggaaatgatgctagttaaaatggcgaatataaacttggacttagtaaaagataacagtaacttgttattaaaaactttcaaagggataaaggcttgaaacctcaggtatccagtttcatgtaaattacttacaagtctaggtgatatttgagatgggtcttaagagaggaagaggaatcctagggagggggaggcgaggcatggacaggcagaaggactgcactgtgcaagggcatgatggagagaagtacatgcctagttttccagttttcctgaggataattttacaccagatcttctttattttaaaaatccaatcctttttcttaataacccctgtctgtccctgataccaccattttttttctaccagtctctcaggctagaaattttgtagttatctttgcctcttctctccatcctgtaaatcctacctgttgggaatacattactgtcctttcttcaaaatgttttatctgtcttttctttttcattctctgctattaagtataacttcattctcagttccactgctgcctagctttctgtgtcctgctaggttcatcattatccatccaacaaacataaaaggaaaactgtttctactcacacacttctgaaaccaaatgtgtgggttttccacactaagcagttctccagttctctctgcagatacaaaccgggtgtcctgcaattcacttctgaattgccatcaactaagatcataagactgctgagcagttggtttgagagggaagattctgagttctgtagggcatatcactttggaaatgtccattaaacatccaaatggatatgtcatggaggcagctggagttcaggttagaggtctgagtcactgataaaactttgggagttgttggcaaatgatagcgtattggtcagagtccgattaggaaagagaagccacacagtcatttgaacaggaaaagtgtacctagggaattgttaattgcaacagggaagtggagtaaccaggcacagactagtaggaagtataggaggagcagctactagtctagggctcaggtagagaactcaggagagtcctcccctcttagtgccctgcccctgcacctcatcagaggaacccagccatggccctctgcttgtcaggagagtcaccgatgctataccactggaacttactagaaatacttccttaggtgctggggaaaggagcggtgtctcagaagagttactctataataaaactgcctggagctggtgagaggagtgggacctgctgggcactggccactgtgtccctggtgaagtcaaccgcctgcaggagccaggcgagggagcataggagaaccagtagcaaagacagctttcacctacaaagtctctccattgctctagataggaggtggtggtcagagtgggatactgtgagggttgcagtccttggacctgacaaggtctaaggtctgatcatggagggagggggaagctgaggtagggcagaggacaagaatgggcttcatgagaccaaaaggatgttagaaagattatttacccggctactgacatctccaagaagtaagaggcctagtgtgaagaagttacaacatcctaagctcttcagggataagggaagcatgcgccacgtaggtagcctccctagtgcagcacccagtatatagcctatgcagagtgaatacctgggggctgctgggggtgataacaaggtcactgtgacaggacctgaagcctgggggtctcggtgacaggagtgggcctagttttttgatgtagaattgagccttgcatgcaccggtgggatcatattgaaaagaaaccctccaagactagaggaagatgcatcctctgacaatgtagtctctgtaggcgtcccaagtagctgggctggggattagatgggctccaaggcatttcctcaggtggcaatgggtggatccctgggaaggcaaagctgtgcaggaagaaaatggcaagatgctaccttccctcagggaaagcccctttcccgggagcagggaaggcgaggcagtttaggctgggtcagtttgtccctgccctcagagtctgttggtcccggaaaaagagggccttattttatttatttatttttctttgagacagtgtcttgctctgtcgcccaggctggagtgcagtggctcgatctcagctcactacaacttctgcctcccaggctcaagcgatcgtcccgcctcagcctccagagtagctgggaccacagggaccacagggaccacaggcgccctgccacgacgctggctttatttttatttatttatttatttatttatttatttatttattttttgagagatgtagcctccctatgttgcccagattggtcttgaactcctgggctcaagcaatcctcctgcctcggcctcccaaaaggctgggattacaggcgtgatccaccgcttctggccaaaagagggctatagggcacccccagaacgcgagatctccctcgtctgtcatctttacagaggaggaagtggactcccaatccagccatagtccattcgccccgggcacggtgactccggggcggccagaaccaaatgtgtctcctggcttttgcacggcatcaagtaacccgcgccaggccgcacagctgccctggccttcagcaaggactccgcgagcgaggtgcaagctgctggggagtgccacagcaggagctgaggcagcggattccgagggcggggtggggctgaatcgggagggacgcggacccggtggaacgcactgcgcagacggcgccggcgccagcactcggccgttgacgagtctttcttccagctgtcccctgaaagtcatccaggcggcggtccctttttttctgcctttttgtttccctccggcgagtcggcgcgagggtgaatttccgtttccggcggtgtccaagcggacctaaggagtcgcagttgtgaacaggtttggtgccgcgggctggggtaggcggcggttgggtccgtggctctggggcactgggaagatcgcgagtcgtgcgcatgggaaggtcctcccccggtcctccgggtcatctttgctcccgaggagcggcatatttcgcatctgcctgaggtgtgcccgggggtcgttgggagagtgacgggatgaatccctgcagagagcccggactgggagggaaggtgtcggggagacgtcgtttcctggcgacgtggtcccggcaggcgacttagacctgagccgaatctgttgaccccaaattgtgcttttcccaccaagaagaaaagggagagaaacagtacaagttcggcagtaaaatatagtagagaagcaatataacctctgaaatcacacagctattcagtttcaaagcgttcctagtgcccagctctcctaactcccggccagtgttccttgacatatggtgatatataaagactttctgtttccgctcgtgtgtgtgtctgtgagaagcctctgactcacttctgtgctccagtagcaccctctgcagccttgcaatgtagcccttattgcatggcacggaagatactagtttggatttcctctgccaatcagaccatagctatatccattttctggcacagtggctagcacatcatagacagacacaaacatttattaaacggaatgaatacaggaccttaactgaatgaaatggtaccctgccccgctttttctcaatcaagctgtcagattttatgcagcccgatattccaaaaaaactcacagattcagtgactaccaatttattggccacagattcccaggtacctcagaaatcactggaagggtctctgtaagtccatggggtctccaggcatcatctaaaaccagtcatatctcacacatacagatattgctatttttcaaatgtatgtagatgagctgtaatttagaagttttagagtcaacaggtactaaaagtaatactgcgatcctattggaagttcataaaaacgttttaaattttttattgaaatttaagttctggtttaagttaggaaaccacttcgttagtccagtcgatgtctaggtctgagctgtccagtatggtagccacatgtgactatttagagttagaatgaaattaattaagaattcattttttcagtttctctgaagtacattttaagtaaccacatgtggctaatggctaaatggctgaaaagtacagatatagaatatttccatccttgcagaaataggtactggtgatgttgacacttgagatgaataaaaagtaacttaaccatagaatgtaaccttagcagaggtaactcatctaatttatagcataacagagagaaatgaaattggggatggttaagcagtttctacccttgttcagtgaacaaatacatcatgtcttcataaagaaataaatgaaatttaatgtttttccctgggtattgcctggattgtaaaatgcttctcccacctccttaccccaaccttcttccttgtaggttagagttacttgttattggtaaatagccactatggagactaaggaccagaagaaacacagaaagaaaaacggtggacccaaagctgcaaagaaaaagaagtggcatctgcaggatctccagctaggagactaagaaaatgcccagaagagaaatgccaatgcttttgcagttcagtctgctgtgtggatgtctcgatcctttcacaggtgtgtttagctacagtctgatggttcttccattgaatctttttaaatagttaggagcctctcacaggtgacatttggattcacaagtctagtccagctccaaaggacatggagatgcatgctgtgtggcttttactaaaacgtgagaagacttgccatagaagctgccttgcctccagcatctgcacactggttggcgtttcttgcccaagatacaagaatttatagaatttgattcttcctaaactttaaactgtttctatggtgataagtgtgctttttccctctggatatgttttacaaagttgtaatataaaatacaaaaattacaatatgtaatactaacatagctttatttagtgagtccttatgatattcttagcagtgtactttaaacgttattcaactaaatccttccagcagccttaccagagtaggaatcattcttgccctcattttatggacaagaaaactgaggtcaagaaaacaagttacctccaatcatacaaccagtaagtcggagagccaaatttaactccagagcctctgctcttatctgttatgatgcactgcctcagtatttaccttttggtttttaaaaaactataaaaatcactcataaagcagtcagatttaaggtgtgtttaattttcaactctatactattgaagtcatcttgttacatctttattgaacagcaattgatttggataggggtcagaagttaataattgacaagttacttatatttttatattgtctgttgtactctctataaaatatactaaagtactcatatctgtaattatactaaaaaaaagtctacttataaggttgataccttttactctattttaaaagtgagtttactttttttttcttttttaaataaataggactctggatttgaagacacaaaagcatcatattccagtggttgatggaactccactagagccgccaccaataccggtagtggtgacggggcctccaaagttggaaagagcactttgatataatgcctcattcggaacttcacctggcagaagttcaccgagatcagaggccctgtgacgatcgtgtcaggtaggagatggtgccacagacacagacttggcgtggctgttgtcatctgagggacatgcgtgtgtttgttgttttcttgagtggaacatgttaaatattgtcatatcatgttacctctctcttacttttactaagttagctataacttcataaaaggataagttcccagagataaggatgtgatacataccttatcctgactgctctatggctttgccaagcatgttccttggaagggcctgacaggcctggtcactgcgaacacaccatttaacagacagcacgtacctcctatgtgccaggtgcacatgcttgcccttatgaagccacatgctggtggaagtgcgcgttttctctttttcctatgagaatttgtctgctttgggagatggtgacctttccaagtttgagggaagatgaaacaaacgtccagtggtagaatggcaatgtacactctgaaatctcttattattgcagtaatatagttggattgaggcttttctttatctttggcgcatccatattttattttcctttttttgagacagagtcttgctctgtggcacaggctggaatgcagtggtgtgattacagctcactgcagcctcaacctcccaggctcaagcaatcctcctaccttagcctcctgagtagtgtatgccaccatgcctggctaatttttcttttttttccttttttttaatttttatgtttttgtagagatgggatttccccatgtggcccaggctgatctcaaaactcctgggctcaagggatccacctgccctggtctcccaaggtgccaggactacaggcatgagccactgtgcccagccaatattttcttgatcattttcttattaccttaatttagaaataattatcattgtaaatattctgttgcattatgtttgaggatgtttttagcgatagtgggaatacaggaaattttgatagaggtgaagacattggcctgcagctgaacagcaagatcatggttatcgtggagcctgtctagtcagaattttccctgttttgagcacttttattcatctgggtaggcttttgatattatctaaatttagaacacaggaagaaaaacaggatggaatttattttaccagtttttgcctataaaaatgaacttctggtacactcctgtaaacgtatgtggtgttttactggatgcaattaaaaaatgaaaattaagagttgatggttagagttttttcagggtctttttaaagtaaaattttcatcttttcacttataggtaaaaagcgcagactcaccattattgaatgtgggtgtgacattaacatgatgattgatctggctaaagtagcagatctggtaagtgagcaggggcagcctggggtgctgatggagacttacagcattgtggtaggttatttaccccgtgatgaagggaagagagttttgtgattattaaaaggatcatggtcattatcagggatatagtagatgtgattgaattgatgatgataataatattagtaataaatgttgtcatattaataatacaaatggaatgtgcacaatgaaatgtgttccaaaatctaaaagcaaatcacaggatggagaaaacctttaatgaacacagctaataagagctcattaacattcatacatatatatgtacaaatatatcatagtaagtaccatttcttcttggatccttcctggcactgtgctaactgctttctacaaatttagcttacataaacccttgatacacccttgaggtgagtaggtattatctatagtttacataagatgaaatagagcctcccagcagttaagtaacttgtgtgaagatgggacccttgttcctgatggttctagaaccttcatccttaatgataatgctaaagtaagtacatgaattgcctgaagaagtggtcagagtttatcaatagaaaatttagatagtactcagcgtgtggaaaatgtacatttatggaaatgataatgttcactatctctgatattctatgatcttttacattagcaaaaaaaagaaaaaaagaaaaaaaggccagacacagtggctcatgcctgtaatcccagcactttgggagaccgaagtgggtgaatcacctgaggtcgggagttcgagaccagcctgaccaacatgcagaaaccccgtctctactaaaaatacaaaattagacgggtgaggtggtgcatgcctgtaatcccagttacttaggaggctgaggcaggagaatcgcttcaacccaggagatggaggttgcggtgaggcgagatcgtgccattgcactctagcctgggcaacaagagtgaaattctgtctcaaaaaaaaaaaaaaattagcaaaaaaataagccatattgattaggaggtgtagggtgacagataccttgtttttttcatttttatttagtttttgctagagctacagattttatactttggcctaggaagactcctaaaatataaaggaaaaagtaatacagattttaaagttgtgccattgtaatgtcagaaaactaaataacattcaaattttgaacatgtaatgctactattagtaaaaataagtgtaattaatgtaaagttgtgtaaagattactaaacttgtatacttgaaatgattgaatagttcatagaagtcatttgtttctcttttatttaaaatgtagcaagtttctaattttaaacacatacatattaagagatgcatttacatttttttagttttagttattatggatacataatagttgtacatatttatggggtacatgtagtattttgatagaagcatacaatgtgtgatgatcaaatcagggtaattcagagatccgtcacttcaaacatttatcatttatttgtgttaggaacattttaatttcattcttttagttattctgaattatataataaattatagtcaccctattgtgctgttggacactagaatttattctatctaactgtgtttttgtacctgttaacctttccctctttgtccctccctccctgctccccttcccagcctcttaaccatcattgagagagatgcctatgtaaatcttaagattttcaaaaggagcacacacatttggtaaagcactctaactgtaatgcacggtacacacaatgcgcattttctctttccttgctgtaacctctggtctctcaggtccctgcagacctttatatatatgtatatgtatatgtatatccttccagatacatataaacacacatgccaccctttaaaaacacaaacggtagcttattttatacactgttctatgctttgcttttttcatgtaatatatcttgaaggtgtataatcagtaagtactgtagctctgcctccttctttttaatataacattccattctgtggatgcaccataatttatttagtctagcttatgttgattgctctgctctgggttgtcaaagcctcctgagtacagcagaggcacacacagtacgtggatttgggtgtgtacgtgcgtgtgtggattaggggagtgacactggcttagatggcaaagattggcagctgagggactgtttgctcccttttattcctgaccctacaaccagctgcttgtcccttggcactctggcatcagatgtggtgtgaggatattccacctgttctttgagctggtccagtgttgctggagagctctgcttgctgccttggtctgcagtggcagctgtgctttcctacaagcccaacttcatatattctgtggttttgggttttgaatgtttcctagtttaatcaaggatgggcatttctgtttccattttgtgttatttttagttatccatggaaagatagaaacagaactatctttagtattaaaattacaagtttccaggaatcagttctgaaattattttgcatctttgaagtgtcttaaattttaaaaattggtcttggccaggtgcggtggctcacgcctgtaatcccagcacttcggaggccaaggcaggcagatcacggggtcaggagatcgagaccatcctggtgaacactgtgaaaccccgtctctactaaaaaaatacaaaaaaaactagccgggtgtggtggtgggtgcctgtagtcccagctactcaggaggctgaggcagaagaatggcatgaatccggggggcggagcttgcgctgagccgagatcaagccactgcactccagcctgggcaacagagcgagactctgtctcaaaaaaaaaaaaaaaaaaaaaaaattggtcttatctgcttatattttcttatagactaccattcatcataatctttctgtttttttacttaattctaaactggtagctatttcaaatatttctgagcaattgagttatacaaattaacatacaagttagaggtttccattgtatacttcccagcaaaaaaagattttttttttttttctgtgaggagattgaaagaagaggttggttttctgtacgtatttaatatatttcattgattatcactttcttcccattctttggatgtcagagacctgttatttggcttaaaaatacattacagaaaacttcatttctttaaattaggatttcttaggtaagggccaggttagacccagccttttctgagttacttctcatgcattagaattcttaaaatggatgtttatatcctagtggccttgtcttatggttgccttttagagcaagtcagagggtggtggtttctctgtctgggtgatgcctgtgtagtcatttgatttagtctggagtgggacttttctgtcgagggccagatagtgaatattttcagctttgtggatcatatcttctgcagctacttagctctgcagttgtagtgcacaggcggccatagacaatatgtaaaggaattaatgtggctatgttccaataaaactttagttacaaacacaggtgatgggctggatttggcccgtgggccagttgccaacccctagtgtaggtggtctgttttggtagtttcttcgagaaataatgtgttgtgcttgtaggtactgatgcttatagatgccagctttgggtttgaaatggaaatgtttgagtttctaaacatctgtcaagcacatggctttcctaaaattctgggagttctcacccacctcgactccttcaagcataacaagcaactgaagaagacaaagaagcgattaaaacacaggttctggacagaagtttaccaggtaggaagagaaataattgttagacactaacagtataatcctttaaaaccagactaaagaggccaggcacagtggctcatgcctgtaatcccagcactttgggaggcagagtcaggtggatcacttgaggccaggagtttcgagctcagggcaatatggccaaaccctgtctctactcaaaaggcaaaaattagtcgggtgtggtggcatgcacctgtaatcccagctactagggaggctgagacgtgagaattgctcaaagctgggaggcagagggtggagtgagctgagagtgcaccactgcactccagcctgggtgacagagtgagactccatctcaaacaaacaaacaaacaaacaaacaaacaaaaagactgaagagacattactaaacatctctctaggaattgcctcctgaattccctttgtgtatgtgttcccagtctctggaaggtgtccctcaagagagtggttattctgggcctcttggtgtatctcatttgtctccgtacctgctgcaccaggcaatgtctgggtgttttggagtcgggacttaatagagtacatcagaagtttctcccagttacaggaccaggcactgccccttcctttccatactgctgtggtccatcggccacagaaccgtttctgtgctcagaggcctcacctccctctcctcaccatacttagacagatgcaccggcttggttgcagagcagtctgcctctgtgtggttctaataagtcctgaaagaatccagcaaggctctggaagcctcaggacagtggctttgctggaagtctcccttcttaggattgcttcttgtttagagcttttattttgttgcagtattgacgagaatttaattgaaatttaatttttaattttcctttaatgtttaggttgccaaactgttctacctttctggaatggtgcatggagaatatcaaaaccaagaaatccacaatctgggccattttattacagttatgaagtttaggcctctcatggcaaacttttcacccttatatcctggcagacaggtaaaaagtgattgtaaactttttcttcctgggccatgtatttcaaagctaaaaaggctagaaaaagaacagtgataggatttattttgtgcctatttgaatagtgggggtagaagtgcagttgatggaaaatgtctacttatatcattgctcaaagatgctgtgcctttgggagtaaattaattatgagatgtttaggaaaatgggaggacttggaagcatttaaggctacaggatgtggccccatcctacgttcagcctcggttttcagtgatgctgccttcgtgcccgggtgctggagtccttcgtgcgtgccttcagtttccttcctttgtgctcttctttgtgctgtgattttctcagcctggaataccccttttccacctgccagaatccaagccacagtacaaatcccagagcacaggctcaccctcttccagaaacggattttctgcatatgttcttcactcttccctgaccccaggtagacgtcgtctcccatctggtgtcttatggaatgaatgtcactttcagcctagagacacagttgtgtgcctgccccttttcctctgctggatggtgaacggtgcttccttatttctgcattttctagttcctaagtgatgtgcttagtggacaagagtgtgatgagtcattgacacatgaaaggaggtataggaactttggcattcgtttctgctgtatgattgagtttatttttctaggatggaagatttgacaaacccggaggatatccaaacaaacatcaaatgtgaccggcaggtgtcactttatggttatttaagaggagcacacttcaaagataaaagccaaattcacatgccaggtattctcttgttgtagaacatactagaattgcacataggattcttgggatggcttcatttctcaggaaaaatgaaaaatgaccaaacaagggaagatggccttgctggaggttttaaaagtaagccagctatgtgtaggcctgcaaaggtgttaccgaatccctcttctctgacctcttgtagctagagggccactgttccagtgtggcacaatgcccttctttagggtcatgggttaagcccttggactgtggatcgtttttaaccccccagtcaacagtagatacttactgacttcttgtcagttgaagctggctttttgggtcccgtcttccaggggtagaacattttgccatgagtgacatcggtttcctcccagacccttgtgttcttcctgaataacaaaagaagtgctgtttaaataagaaggagcagctggtttatgtgcctgtttctggagttgagggtgtgctgtatgacaaagacgctgtctgtgttgaccttggtggcagccacggttttcaggcatcagtgaggcaggagtctttgctctgaactctcattattctttcctaatctattttttaatcaaaaaaagtaatgtactcagcttttatttattgaagatttttctcttgtacttataataaaggcccaaatgcatattgtcaatatgtagaataaaaagaataccattttttcattgtaccaagcagaagagtcctgtcctccatgcctccttgatccatggccccagcgcgggcactgctgccagtgtggcacctgcacggcttatttctgtttctacaaaatcagtgtgctttccagctctcgtttgtctttttctttttctcaatcacagtggtctcctcattattttaaagtggatttccaatatttatttcttagttctgtagttgaattttattgggttaaaagcagggttatttaaaaatgttagaaaagctagcactgttgtagcactggaactgaggtttttctagctaggtgtttaggttatcaggttatatactcactgagctttggacaagtttaatggagatggggatccatttcaagctttgttataaggattttcttctctggtgtttgtggcattaagaaaagatctcaggaaatgtgtctaagataattttgagaaactgagtgaaaccagtgtctctccaggatctttgtgctttcctcacgtgccctttcttggtggccttgataggacaaggtggggctcacccatgagctggtccagagtctcatctccacctactccaccattgatgccaagatggcttcaagtcgagtgacgctgctttccaattccaaaccacttgggtcagaggctatagataatcaagggtaagtctgctttttttctatttttaataaaaagatatattacagaagattgtatcacccataattctgccatcataacacattttggtgggattcattctatgtcgttttgtttttctttgtgtgtgcatgtgtctctgagggctcttcacttacctgacattacaagggagtcttatcttgaaaaaaaatacaggatgcatttttcaacagacttcaaatattcctcaaataccacgccatcttccataggttgcttttttggtttttcagagacctgaggccacttggctttcttttgatggccgaaacactagagcagagtcagggagtttgtggctgtccagaagccacatgccttgtctctgaaagttttatttagattatgttgtattatctcccatgggtaggtttccactaatgtgtggcttatgtgaattatttttcagtctgggttgggaatttgtatacctttatgcttagtggatgtttgcaaaacattgattttgttgtattgatttatgactcccagtaaaatttatctgaaaatcttgagataatgtagtatataatttgttacaatgtgcataaactacctaccacagtgcctgacgtaatgagtgttattagctgttttcatttttgcatatccttctagtcatccttgtctacaagaatactctcttctaatatagctacaggtaaaatacataattttatttctatattctgaggattttttttctatacagtctttatgtaatcatgattttattgttaccagtgtttttttgttattgtggtttctttgtttttgtttttgtttttgtttttgttttgagataaggtctcactttgtctcccaggctggagtgcagtggtgtgatcttggctcactgcagccttgaactcccaggctcaagtgatcctcctgcttcagccccgcaagtagctaggactacaggagtgcaccaccactcccggctaattttttttgttctgttctagggacgagttctcactatgttgcctaggctggtctcgaactcctgggctcaagcaatcctcccgacttggcctcccaaaatcctgggattacatatgtgagccactatgcctggcctgttattcctgtattctaacttatccatcccttatggtatgatttttagttttttctaatttatgttttcatacttttatctattgtgctacgttaaaaagcttcatatagttttctttcatccagtgattttagccccctgataatcttctctatcagttatggcactggtgactcaaaatggatgttattcctctgtcattccttctaagtttgttacctggcatttttaacaaagagctttctcttctcccctttgtttcagcatcacggctgactaatgcacttgcgttttattccatgggttattttccatcactgtcattgtactttctgatgcctatgctgtcccagattcggctgcgggagccttcggcctgtctcctgtgtcccttcaactgtctctgttagtctttgagcatttcttactttctgacagaaccagaggatccaggctcattttgtcctcttcctgccttgggcctggactcagccatttctcttaaggatcatgcgtttttagcttagaaattaatcagctttccagaagatctataaaaccctaacttcccttttgagcaatttttttctaaaattagattttttttttaagggttattcctttattctctctataagttcttttgaagtgtggtgttagggaaccatgcctcagtttccttattaactcttccggtgtttatcagatcattttttccctacgctatgtcatcttaaacatcttaagcaattcattgacattttctgtttcttttgtattttcattgactatatttccagttctagattagctgattaatgtacaaattgaattattttgcatatccttggtgatataggctgttgatgccaaaggaggaaaaacaaatagacttgaaaactggtcgaatgcgtcagaaagccatttttggagatgattctgtgcgaacgtcttctctcctttcttgatctcttaatttttttttcttatccaaatatataccagctgattttgtctttctagaagatccaagatctttggtttagagatatattctcttaatgttaactggtattagaatactcttttctgtattttatttcgatgcattttaaaaatagaaatgattgtattttcttttaacttgtgaagtagagcatggcatacaaattttgtattctcattatttcaaaaaatttccttcttagtgtacaagttgtattcagcacataaagtccatccagctttgttgtagatgcagtgtgattattacatgttgataaggtgtgaattggagatgggatccaaaagtactgtacttattgtaatttttaagctaattgtagatttggtggtgaatattttactactgcaaaatgaaaacagcatttcatcagaagttgttttatggtctttcaggcattttattttatatctttgatgctttttgcccatgaagtatctcttttgtgtgtttgtgtgtatgtgtactgatttgctgtaaatttcacagtgctcattgtcagggatcatcagaatcaggcctaggcagagagctgagcagtactctcagtatgtctctgtgtcctggttgccgcatatctctgttgtttatttataaattggagagctctctgatgtgtaacaaaggttggatagatcagagacaattggaagacgaatcctctactctattgtcacctcttatttttctattcacacatgtcagatagagacatgcgtgttgtaaattattttgtcagaatgaaagcctggcagattaagtgatttcttctctttttgctgtacttgatatcgatctcttgttcatttcttgataatatgtttggttatttttgttttcattgcttttggtgtcagagatggctttggattccctgttctgtgtgctcctgtctggctcctgaacccagctggagaggtgtgtcaatcccaactggtgaagtactgagaggaagctacacaaaaggcagcaaggtgttaataagtgtacctctgacattttaaccacctctgacttttccatggaatggacaagtagtagtctctgtcagagcaatgttttaaaggaaaaaaagaaacttgaggtcgtaaactgtttattaatttatgctgttattttgtgtttactcaactcatttatattgacttgtaaattagtaatttatgaactactattcatcaattcattgcctacatgtcagcaaacaagttttcttcttaataaagaatccggtggctgggcacaatggttcacacctgtaatctcagcatgttgggagggcaaggcaggaggattccttgaggccaagagttcaagacccgcctgggcaacatagcaagatttcatctctacaaaaaaatgaaaatattggctgggcatggtggctcattcctatagttcaggctactcaggagcctgaggtaggaggatcacttgaacccaggagtttgaggctgcagtgagctatgatcctaacactgctctccagcctgggtgacacaccaagagaccacctcttcaaaaaaggaatctaggggcatcagtgtgtgcacacagcatggcttgtgaatgcggaagtgcctgtgtgcatagttgtgctcaagaatgtgttgatgattatatcttctcagcatgaaaaaaagttgttgttgtttttttttgagatggagtcttgctctgtcaccagactggagtgcagtagtgctatctcggctcactgcaacctctgcctcccgggttcaagtgattctcctgcctcagcctcctgagtagctgggactacaggcacacgtcaccactcctggctgattttttgtattttagtagatacggggtttcgccatgtgggccaggatggtcttgatcccctgacctcgtgattggcccacctaggcctcccaaaatgctgggattacaggtatgagccaccgtgcctggcctgaagttcacatttataaagatctctctacgtcttagatttgattcttcctttaaatatttttctcattgacatttgaaagcacctgaccttatataaaatgaagaattttcataactccataaaaggagaattatgacatcatctactatttctttctcttgtctcataaatctaaaccatcaacctgcttatttttgtatactgtcacactgtgtattccctgcattgaatgcctttctattgacattgtctgtaaaaattgtgggaagttttctgcaccctaaattttctgttatggggattagatatccagtatccatgtttttccaagtcttacatcagaaagggtaaatacagccctcacagcagcctgttgtttgtcctgcagttgtgtttccatcacattacacaaagcctctttgtcttcgtggttgtaccctgctaataagttttttttaaattatgtaatatgtgtatatacaaatacctatatgtatgtgtgtacacatacagctgatatctactgagattatgtatgcatgaactatagaattaacttgtaattttaagaaaataaattattttgtaaagataaatctcatgtttaagaaggggaattacaattgaatcatttagggatgcctcagcctaagcataatatggaaaaagccataaccaaaagtcattttagagtactgctaggttactcaacctatcatcacatttaattaaaatgtcagtttgaaccatggccagtcgattttcgttaatatgttatttaaatcaacttgtgaagtcttcattttagatatagaatttgtgttaatgaactggaaaataacattctattgcttggaagatgtgttaaagcctaaatatttatgactttgtaaaagaagaaaaccagctggtgatcagttggcattagtatataaggatgtactcatatttgataatagccatttttttctaacaagagtaagggagttgggaatgggaggcagagacagggacacagatatataaaaaattgtagacaaaactgtattgcgttctgagtatggttctgtgatccatggttcagtttgagaggttcctgtgtcccttatgagaagggacaggaaagccaggaggacaggagtatgtttgggcctgtgcctgtgcttccaccacagaagtcagcagctctacctttctcttttctcctctttatctaataattgtttcctcttcaaatttgggaaatgagcttaatcaaatatttgttgtgttttttgtttgtttttgaaatgtggcctcagtgtgtttgcccaggctgatcttaaactcctgggctcaagtgatcctccctctcagcgtcctgtgtagctgggactacaggcatgtgccaccacacccagctaagttaatgctaatgtgtagtttatctgattcagttttgaagggcggggtatatatagatagttatgttgtgtgtgtggtggtgggggtagtgtttatgtgtgtgtgtgtatatatatatttatatattactagtccattgctgctacaacaaactaccagtatgtcagggcataaaacaaatttattacactcccgtatgtcagagtgtgatgtggatctcactgggctaaaatctaggtggtggaaaggctaccttcatctctagaggctctaggggatcttttttctcgccttttccacattctggagtctgcctgcattttttggctttgggctcttctccactctcaccattagcaaccttgcatcccatgggcccttcttctatggccacatgtctctgtggctctttccttcccccttctcttccactgttaaggactcatgtgcttacttagtcctgaatggagacaccgtcatcatccacatgagcccactgtcctaatccatacaggctgctacaaggaaatgcattagaccaggtagcttataaataacagaactttgtttctcacagtcctggaggctgagaagtgcaagatcaaggtgccggcagtcttggtgtctggtgaaggcctgctttctcatagaggcttccttcttgctgtgtcttcgcatggtgagaggaacaaacaagctcccttgtgcctttaataaggtgctaatcccagtcatgagggcagagtctcccgtaaggcttaacctcctaatgccatcaccttgagggttaggattttaacacatgaacagtgacggaacacaacgttcattccatagcaccagggtagtctcctcatgtcaaggtctttacctgaatcacatgcatgatgtaccgttttcatgtaaggttctaggaatctgtggacatctttggggggccattattttgctgatcacatattacatattttttaatattctagactagtatgaaaacaatgccacttccattgctttatatacgtatctatatacacattgtctaatgctataattaaaaaaaagttgtagacacaaatatacccatttaaaaaaaaaattttttttgctattttacttcatactgccaactcctttttcctgaaactgcttcaactctggaattcttttttgctattagttttattttattgaaatattcatgaatgagcatacacttgtatatggatttaaaattcacagtaatgttctcatgagttcatctgtgaataacattttatagacaaaatgtctgcactaagacaagagaaagatctataattcctttgttctaaggtaccgccattcattgttattattttaaaataggagtgttgactgatgttaaaacacaaaatgggttcgggagtggtggctcccgcctgtaatcccaacactttgggagaccgaggtgggcggatcacctgaggtcaggagtttgagaacagcctggccaacatggtgaaaccctgtctctactaaaaatacaaaagttagctgggcatgtgttgcgcgcccatgatcttagctacccgggagactgagtccggagaatcgctggaacctgggaggcggaggctgcagtgagccgagatcataccagtgcactccagcctagatgacagagtgagactctgttcttcccccaaccccccaaaaaaacacaaaaagggataattggccgggcacagtggctcacgcctgtaatcccagcactttgggaggccgaggtggatggatcacctgagaccgggagtttgagaccagcctgaccaacatggaaaaaacccatctctactaaaaatacaaaaattagctgggcatggtggcacatgcctgtaatcccagctactcaggaggctgaggcaggagaattgcttgactctgggaggtggaggttgctgtgagccaagatcgcaccattgcactctagcctgggcaataacagcaaaactccgtctcaaaaaaaaaaaaaaaaaaattataactgggcagtggaattgaaaatgattttaaaaaatatccaaaatacctaaggaacttgtataaataaataggaaaaaaaaagagaaaaacatcaagaagcccacaaaaaagcagatttgtaaatgggcaatggattcgaatagacatttagccatagaaggcatccagttggtgaaaaggcatatggaaaggtgctcagcatcactgattatcaggaaaatgaaaatgaaaaccgccacgagtggtttagaccatagcggcatgcatgaaagttttcagacctccagttgttgggagtggctgaggagattggggagcttctgtctgagttggaagagtggagtctcaacaagaaccagcgtattctggacatgtgtgcgccctggagtgttcatggctggatgccttgtctacctgtgccttacagagtgacaccattgtggtgtggtcgatcagaggggcaggaggctttcagagggagtgggaagtggtggggcttggtttgtttgcccatggatgacagcaaaagtgagttggcttctcaagaacttttaccagtagcctgttttgctacaattctagacccagactggggtcccaaggcatcatagcccacagcttcttagcaagtgcatgttcagttggatcccccagctcagcctgggtcatccccacgttctgcctcttgggccatacatagctcagctctgtactgagccatcatcccatggtgagcaagaccccattcttggtcttcagtctctttccctgcagcatgcaatcaaggtggtggctggaaggggccaaggagccacatgtcacagtgccctgctgcctgaacaaggaccagaggcctgtggaacacatggctctcagatttctcccatttgatgactcatcagctgcccccacatggctttctagctcacagcagatctagccttctctgagcagtgaagatgggatgttttatggtcattttccctggtgtggagagcccaagtggagttcttcagcacaccctacaccatcccctcactaacacccccacctgtccagtcttacctgccttcatatcaaaagcactcagttaacccagagggcttcagccctgccctgcctgactttctaggaaacccctctctccacccaccctaatcagacactgtctgaaggttccccctcatcattttaaaaggaagagaaatttttctgacacagaggttctggtgaagtggccagctcccacatcacagggtgatggtggtttggactggaccaggatcagacagtgctgtcctggggctggccatctgataaggggctccagaaagggcagtgatggacccctgggaggctttctgctctcctgatcacaggtttttggtgagaggacctattggccactagggtgtctgcgggggtgtgtgtgtgtgtgtgtgtgtgtgtgtgtgtgtgtgtgatgtgtgtttacttggaatgacttctttcagcatgaagcccactgttttgctgaacgtatctcactgtttcctgaaactcagtacattcagctggcttaagggtcctggggcctcgctgtgtcatatttgcacaagcctagtgtctgtgcagactgtacactggagttcagttgtaagacccttttgatcccttattctgttcctgtaatagaaaagccatttcactcaatggaatagaaacccagatctaatggagagatgttctaatctgccatacactggggcagtggccagtgatttggactttgtggcacagatggaaatttccaggttctctaggtggtaggcagaggcctcactttttaagaaactcccccactccacccctgccaatgaggacattgcttagaggtatttctatcagtgttgagtagaagagatcatttcttggtgttgaatttcaggtaaggatgccagcttctgcatatcagggtggtgatgtttgggctgcgacaggtctagacagcagtctgaaagggggctcaaggaagtagctgtgaaaggcccctgggatgttttctgctcccctttctgcaaatcccctggagggagatcctgttagtcactacgggatgtgtgtgtgtgtgtgtgtgtgtgtgtgtgtgtgtgtgtgtgtgtgttcatcacttgttgcttggggtgggaagagacaacaacaacctacagaatccatagttctcagttcatctcccatcctagtccaatcatggcctaacatccttagctaccgatcgcagaggagactgcgcatttgtgttcatgtggccttggatgttggcagattcagattggtgccccaggcatctgtgctgtaactgcagtttcagcgggctcaggaccaggctaaagggcctccaagcttcctccagtttcctggtgcatgcatgtgcaatatgctcccctggcctgggtctttcctgccgcttcttgccagttgggtcagaactagcttattaaccagtttttcttctgagctttaatcgaactggctccaaccagttggaggcttgaaaagggctacgtgctagttatagatttttaaagatatattattattttagagtagttttgagtgtacagcaaaatggagtgcagagtccagagatctcatatgccctcaattcctgtatactctcgggtcactccaccaacaacctcctacaccagagccactttgaaacattagaaaatatatttgagcattcagaaatgtataaactaggcagccccagactgcaagcagctcagaggtcccacagagaggcttagggagggtgggggaagaattttatatggtgaatgtggaagaaaaagaaaatacttgattgggtgaagtggagcagtggcctcatttggaacattacagtggaaggtctctagttagatgttagttggtggtttctgattggttcttacatttccttttattatttacactgagtcaagttttggtttatttaaggaggaattgagtgcacggcagccacctcagcctcatggccacctgtttatttgattatttttaacagagaagatccttttaaaaatatctgttaccgtggctggagtgcagtgacgtgatcacggctcactgcagccacaaccttccagctcaggtgatcctcccacctcagtgctccccaccctgagtagctgggactacaggcatgtgccaccacaccaccatgctaggctaatggtttgtatttgtttgagagatgcagtttccctaagttgcttaggcttcttttgaactcttagactcaaataatctgcctgcattggtctccccaagtgctggaattacaggccatctaaatcttttatctcaggtttgccttgtgacaaaaggtggggtactttttctgacatgatgaggcagagaaaggtgaggtgggtgcatcctgtgcatatgattttctcaggtgatgggaatatggtgggctcttgcctaatgggatatattttctctttgaatgatttggcaagatatcagatgagagaagttgaataaatgttagaagaacatagaaaaaataggttatacacattgggtttctgaagaaatgatgtcattggagaaacaaaacttttattgatttctggaaacatttagggccaattttttgtgtaagtaatttgaatttatgatgatatctctgaccactttttgatattttttctggttcaggtgagtggtgtcattgagcaaacacaaagtcgggctcatccaaggatgagattttgccagagaaaggatgagcagcaagtcagggagcttaaggtaattatgagacagtgactatctaaaattgcttaggtagaaggagacagattggatttttgtgtgtttggtatttgggataagagggatgtgggtgtgtacttgagatgtgttgtttattttctctcttttttctttttttttttttgagagggagtctcactctgtcacccaggctggagtgctgtggcacagtcttggctcactgcaacctctgcctcccgggttcaagggattctcctgcctcagcctcccgagtagctgggattacaggcgcctgccaccacgcccggctaatttttgtgatttttttttagtggagacgagatttcactatgtaggcgaagctggtctcgaactcctgacctcagatgatccacccgcctcagcctcccaaagtgctgggattacaggcgtgagccaccgcgcctggcctgtttattctcttaagagagaaaatgaggggattaatggactgtagttctggacaaggtggaaaactcttaaagtggaagtactggggcaagtgctctgacagggtaggatggtgcagtcagtcccttcacccagaaatcagtagaatgttagcagttcagactcaaaccttgtgaaaaacaggtggtggaaaggaaatccctcacagcaactggcaccataatcaagacaatgtttacaggataaatggagttacctgctttcagccccaggtcgtagctattgtctgccctgctgatatgtgataataatttgtgatcctgttgtcttaaaatggggtcactcatctccagtagaattaagtccacagtgaagttgtccccccatccccaaagagataaacatatatgaatgaactcacgtgataacaactactgctgcctgggatcatgagagacctgaactgaactgataggaagtgaaaggtggctgagataatgagaatagacccatctgcagaggatcataaaaccagcaaagacaagatcttgtctaagatgccttcacaagctttgtccatgagaactcttaaggatttcaccagacctgttggctgctgctgtgatctctgcccaagaggagcctctgaccaacatccaaagggcttctggacccactggactcctctggaggtaccttggtctcccgatccatggctgtggttttttactccctttatcactgcctgtgtgtagaatgataattgcacaattgatagtgtgaagacctcttgataaatggtaaatctgagcatatgtatttggctgacatgtcattgtgaaacctcacagcttcagtcagtgtctctccaaggactaaacaatggaagactgtagaagatgctattcattaagatatcgcaagaatatggaagactattattcgcttctcatgggacaggacttttcagggcacctgaaaaaactcccatgaaaaatcacttttacaaaatgtcaagttatgatatccaagatgaaaccaatgagtcacaacattcacataatacactgtacaaccctgatctcttgactgtcatcaaatgtttcttacctctaaaccaaagtttcattttataatttaatttttctcattttttccattctcttagcttaagaaaagatcattacaaactttttgtaagtttttcatatatgcttgcaaagggtcgtaaaactttattgtgattattcttgctttaagctgaaacatccctaatctttctttagagattgtggcatagcatgttagtttcttttccatatccaattgttgtctgtaatgaatacagaaatacgggcactattttgtaactttaaatagacatcatctcaagtctacaagaattatccaaaatggtatttaatgacatttctaggtcttcagacactattaatgcagattgtagcctctaggtcctgaagattttactagatactggttactgaaactgagctttcttgaattctttttccttccactgtggtttcccgcatttcaacatatcacctatttttgtcctcaaaggttacttaaattttttccacagaattaaattaaatatgaatcatccctcctctgatttttgaaatgaccctttgcttcctatgataatgattcttctggtccgttttgtagttatatgttagagtttgtaaatagtcacacattttgcaactgcatgtaattttcttattattttttcctcttcctctaaaactgctgttatttcttttaactttttgtgggaaaaattaaacccatctttcactttgttgatatacttatttataattgaactccttgatttttgctcgaattgcttttcaagttacccacttttagggaagacattatttgggttttgtttagtgtatcaggctttttttagttagttgtatcaagaagtgtagacttttctatacataatatcctttttcccacagtatttttttttttttttttaagtctagccgggtgcagtggctcacgcctgtaatcccagactttgggaggccgagacaggcggatcacgaagtcaagagatggagaccatcctggctaacacgttgaaaccccatctttactaaaaatacaaaaaattagctggacatggtaacgggtgcctgtagtcccagctaatcaggaggctgaggcaggagaatggcatgaacccaggaggcagaggttgcagtgagccgagatcgtgccactgcactccagcctgggtgacagagcaagactccatctcaaaaaaaaaaaaaaacattctgttaaaataaaggtgatcaaaagatcttttcccaaacctttcctttaccagaaatagctctagtgtcacatggtcctttctcccttcttgcttttgtaggaatccaaagctaatctgtccctgatccggattgcacgcacctgtgccttttggggcccttctgcattagttcttccttctcttctaacctcaaaaatgtgttttttctattggctctttccctttaacatagaagtatactcacgcttttgttgaatcttgaaataaaagtcttcctttaccacatatctccctttaatactacatctctcttctcagccaaatacttgggaagagaagccctgagtttgtgtcattgttttctcacctccagttcactactttgcccactgcctgacatccagctcactcacacacacacacaagcccaatcactaagttgccatagctaatttgtagctttcctgccttcctggcaaaatttgactctgcattgggataatacatgtcgagtacctattgaacaggcactgtgctaggtgctactgttatagatatgaaaagaaggcatcatctcctttctaacaactcacaggagcagccattcctgattcatacatgtctcttgactcccagtgctcactttttcaagcttcacttaatgccgtgcaaatcaccctattctccaggtcttctttcttcccagttctccttactatacacaacttctcaaggcagtcacctccacacccatggcttcaattgctttctccattctctgagaacaatagaattttaaatggttttatttcatgtattagctttattttatacaaggtgcctcacctgctgtaaccatagattcaaagttgctccatgaaagtaataaatgaaaaatggtgattttttagcatgtaaattttaggaaatttccccagttacgcttaatggcttgatttagtgtgtatgttatttttgaaaacatatgttgggatgtcacaaatggacttagcctacagagatttatattcaacttttgaccagagagttccattttaatgtgacactgagagtaaaaaactatcttttcctccttacctatttctcttcctacattctcggccaggaggaaggcactgctacatacccagtcttccccagcagagcctgagcagctctgttttccttctacttcccctcttctttcacatctcatgaccaagcacttcctattctgtctcccaaatgatcacagactttttcctccacttttgtcactgccactgcccttagcattactctgcctttagagaaagtctcttaattggtttggttgcttccttcagtctttattatacagaccactacacgcacatctgacagagacttttcacctttttatggttgaatgactgaaattcccagaataaaattaaaaccaccccagcatcaaatttgaggtcaaatagaggtgggtttgtatcccaggttcatatactgtccagcagtatggtctcagaaaactgacctccttaagcctttgtttgtgtatctgcctaaactcattgagagttgggactatttcacacatacagtgcctggcatgtagaagggacttaatgttgaaagaaggggaggcattttaaaatccacatcaaaaaaatgttgttctgtttgggagtggtggctcacgcctgcaatcccagcactttgggaggccaaggcaggtggatcacctgaggtcaggagttcgagatcaacctgagcaacatggtgaaaccccatctctactaaaaatacaaacattagctgagcatgggggcgggatcctgtaatcccagctacttgggaggcttaggcacttgaatgagaatcacttggacccaggaggtggaggttgcagtgagcaatgattgtgccactacctgggcaacagagtgagactctgtctcaaaaaaaaaaaaaataaaaagtaaaaaaaattcttttaaaaatatacgaatctggctgggcacgatggctcattcctgtagtcctagcactttgggaggctgaggtgggcctgatcaacatggagaaaccccgtctctactaaaaatacaaaattagctgggcatggtgacgcatgcctgcaatcccagctactcgggaggctgaggcaggagaatcgcttgagcccgggaggcggaggttgcagtgagccaagatcacgccattgcagtccagcctgggcaacaagaacgaaactccgtctcaaaaaaaaaaaaaaaaaaatagtgttcagcaaggttgaagcataaaaggttaatagccagaatcatttatcaattgtatttctatacatctacaagacacaatctgaaaatgaaattagagaaacaatttcactgggcaacaagagcaaaacttcgtctcaaaataataataataataataatctacaatgtcatttcccatccaagcttgacttctacctttactttctgatatggttttgccatgtccccacccaaatatcatcatgaattataatccccataatcccgatgtgtcgagggaggggcctagggggaggtgattggatcacaggggcagttatcctcatgctgttcttgtgatattcagtaagtcctcatgagatcttatagggttttgttttgttttgtttcttgggatggagtcctgctctgttgtccaggcaggagtgccatggcacgatcttggctcactgcagtctctgcctcttgagttccagtgattctcctgcctcagcctcctgagtagctgggattacaggcatgcacaaccacacccagctaatttttgtatttttagtagagacaggatttcactacattagctaggctggtctcaaactcctgacctcagttgatccacctgccttggcctcccaaagtactagggttacaagtgtgagccaccgtgcccagctgagatctgatggttttatacatgtttgacagttgctccttcacatgttcccactctctgtgcggccaccatgtaagtcggacctgcccttctgccatgattgtaagtttcctgaaggacttccccctctgccatgattgtaagtttcctgaggcctccccagccatgtgaaactgagtcaattaagcctctttcctttaaaaattacccaacctcaggtgtttctttatatcagtgtgaaaacagactgctatactttctgataatcatgcttaagcaattggggaattcagactacctgggatcaaactatggccccacccttagcagtcatgtgaccttgggggggtttacttaccttctctgtcccaacaacttctgtaaaatctgtaacatgagattgtttctgagggttaaatgagcatagcacagtggggacactgtcaggcacacactacttgccagatgtcgagtattcatctttattgaaataggactgtggtaagccactttatggctctcgattttgtatgagaaaatcatgtttagtgccttgttagtaaaagaaagaaaatctgaaagtccctgccatggaaggaagaaatagcggggagaaaagggagttggtaagtttcagcatttcagagcttggagggacaagttaggtttctattttatggagaaggaggtggaggcaggatgggtcctaaggtgtcattcaaaacacacagccataactctttattgagagtagagctagggccccagggattgctgtgatcaagttgcggacaaaaatgaccactcgttggaagacaggagaggagtgtttagttacaaaagcagtcaacaattcaggtgtatctatattcagacagcaaataaaagttgttcaacttggttgctaatgggacccactctactgaggctttgtgtagaactcgtagaggaagctggcttcgaggaatgaactaccctgtgcttttcttaggactaaaatctcaggaagctggtgatgaatgaaaaccttagtcccattggcactgcacgaggggccaggagagcagcagcatcataagccacagggtggggcagccaaggcaggggcattctgagctgttggggaggggtggcaggcagggtggggcactgtgaggtgtcggggagggcattgtgaagtgtggggtggggcattgtgtgccacatgcctgggctcccacctggggccagtgggcttcagtctgtaggtgactacagaaggaggaggagctccgtctgttctctcttcaggcagttgttgtgtctctcagcgcttgttgggttcacaacctattaaataagccggctggtcttcaccctcccagacaagtcaactcaggggaggcagcagggtgcgggccttggcccgcagccctagccggggccggggccggggccggggccagggctggtgcccggggccgcactgtgaggtgggcaggcgaggagcgggaagaccatctctgcaagtgcagcatagcctcggcctaggacagcgggagtgcgtggccaaagctgtgagcagaggcacaggtggtggcagacagtagaggcgccccatggggaacatactgacctgtcgtgtgcaccctagcgtcagcctcgagtttgaccagcagcaggggtcggtgtgtccctctgaatctgagatctatgaggcaggagctgaggacaggatggcaggagcgcccatggctgctgctgtacagcctgctgaggtgactgttgaagttggtgaggacctccacatgcaccaggttcgtgaccgggagatgcctgaaggtaaggaggtgataggtgccatctaccctcggtttgcctctggctgctgctgtccccaaggttccctttgaggcatcccacacttcgagctcctttctgcttgtagccagctttcccgggggctggccaggaacaaaagctggctctgccttgaattcccaccccttagtctttccccaccgagtccagtcagtttcttttcacctcccctcccaatcgcccagttcttgctctctcatctcattctcccaggctggcatgggaccatttatttatggctcttgtcgaataagcagcagttgaataaatgagttgataaatttttataaatgattacgtcctttttcttttctccctctatacatatagctttggagtttaacctttctgccaatccagaggcaagcacaatattccagaggaactctcaaacagatggtgagacaacagtgtctgtagctctgtttattatcctgtgggactttgtttaggcttctttgagctattctcttccttttctcaataaaaactcaaatatcccaacttttcagtacccatcttaatttttctttgaacctatccagatggtacctaagtgaaggaaccaggtaagtgcctaattgtttcctttgttaaagtagccaaatctcaggacagttcctattcaaatatttggggatttcttatttaaaatcagaatggaggttgccacgggagaggctatatggtattcttaatgggctgctttaagtcaccttgatagaagctgcttagtttcttctaactgtaatttgaacacagaaggaaaaagaaaaaaggagagtgcttaaaataattgtgaaaggtataaaatgtcacagccggggctgcagaaaaatggttgtgtgtgtgtgtttggggtttctcaaaggagtttacctatgaggctctgattactttaaaattcttactttaacagaaaatgtgtctccagatttattctggtgacttaacagactttatttacctccttgttctaaaagagaggtggggattggttcacggtcaaaactttcaaaagacatgaaacgtcaacgtagacttttaatgtgtaatataaagattgcaggttaaaatgtcagacttccctgtaagagtgtttgttgccgtggctccccctttgtcccttcccctcctgacaatagcatcttgttcaaagataagaaagttacagttttggctgggcttggtggctcacgcctgtaatcccagcactttgggaggctgtggcaggcggatcacctgaggtcaggagttcgagaccagcctggccaacatggtgaaacgctgtctctactaaaaaagaaaatacaaaaattagctgggcgtagtggcgcatgactgtagttccagctactcacaaggctgaggcgggagaattgcttggacctgggaggtggaggttgcagtgagcagagatcacgccaatgcactccaggctgggtgacagagcgagactccgtctcacaaaaaaaaaaggaaagagttggagttttttagtctctacactgttggcagaggcaggggatgggagccggtagaaaacagaaaacaattagttggtttgcctctaaaattttgcaaagagatgaatctaagtaaaagtaattctgggtaataatatggttcttgaataaaaactgaaattttcaaaatagaaaacattgcatcataaacatattaaatccagttggcttattggtttcatttaaatgccagagatttcattactctagaggaaatgtcttatagctcttctatttaaactttggttgggctcttaatttttaaagaggtaggataattaagactcattatgagtgtgactttgtaacttggaagtactatcttcacatttcaagatatttaaggattgctttagaataaacaaatgcattgtgtgaattaattgattgtacctttatacacaaagcatgtaagtacttgtataaacttatactctgcttggtgatgtttggaaagcctgatggatgttacacaccagttagtagatgggtagtgttggatgagagcccaaaaatggctctttattgtcattctttaggattacaacacagtttatgtatgtctcacttggccctttccaatacaaataaggcctgtgtatgttctccctatgtattgctaatgaagaaatgaaaacttagagatatcacatgactatggaagacagctactcaagagaactaaggttctgtgtcctcagaatgaaatggaagtgacagatatgatgaatttactttttaaaaattttaaaaactctagaatacatcttatattttgcctataaaatagactgtcttttaaaacttactgccatcttgatttattttatgcaaagttgattttacacaactcaaagccaaaatttacctcttcttctttttttttttttttttttttttaaataaaggagggtgtcattgtgttactcatgctggcctcaacttcctgacctgggttcaagtgattttcccatctcagcctcctgagtagctgggactacaagcatgtgccatcttgcctggctctatcttatgtctatacattcatttcaatggataagaatcaaagtagagatagtgaaatagcctaaatgcagcagccgaataaacgagttgataaatttttatcaatgattgcatctctttttcttttcttcctctatgcatatagctttggagtttaactcttctgccaatccagaggcaagcacaatattccagaggaactctcaaacagatggtgagacaacattgttttttccgccaagagaaagaataaaagctcttgtttgatcaggttatagaaagtatttagaaaaactcatattggtttaaatttttcaccttttcacatgttcacttgtcttattttaatatgtgatatactttcctttagttgttatgatgttagtgaaaacgtgtaacctttttgtttatacattttgccatctttttatcaacacaattaatttgtcatgtgttggaggagtcatggatttctctttataattcttggatttatctttatttataattaatggatttatctttatttataatcccttttcccttgctccaaaaagtacactttaaagatgaatgatagaacttaggcttcagcttggttttcatttaaacaaattaaaaaacatagttgtttatcatcagggattgaatctgtgatttgggcctcctcttacacagtcctctgaccacattcatttaccacatccaagttcatgctactcaaaagttttaggttattaactttttcatttgatgtcatgtaaatttaaacatgccctactcctgcttatttccctaatgttatgttaaatcctcatttatttgccaacaagccatacacagccaagttttccagttgacttaaacagcaagaatacaagtgagggttctataatagtgtgcgaagtaatgcagcacagtaaaacacgggagtttgtaacctttgtttttatagtttgagtagactttgcccatcttgagtcagttatttctggttagaatttgtcttcattttttacattactataaagagatacctaaggctgggtaatttataacaaaaaagaggtttaattggctcaaagattttcaggctgtacaaacatggctttaacatctgcttctggtgagggcctcagcaaacttacaatcatgataaaaggcaaaggggaagcaggtggttccacacggtgaaagagagaggggaagggggaaggtaccacactcttttttttttttttttttgaaatggagtctcactctgttgcccagactggagtgcaatggcacaatcttggctcactacaacctccatctcccaggttcaagcaattctcctgcctcagcctcccgagtagttgggactataggtgggcaccataacacctggctaatttctgtatttttggtagagacagggtttcaccatgttagccaggctggtctgaaactcctgacctcaagtgatctacccgcttcagcctcccaaagtgctgggattacaggcttcagccaccgcacctggccagtaccacagccttttaaattaccataatgagaatttgcttattaccatggggatgggaccaagccattcataaggaatccactgccattacccaaatgcctcccactaggccctgtctccaacattaagggtcacatgttaacatgagacttggaggggcaacatatccaaaacatatcagaattgtatttcccagttccttccagagccatgggcttctcacacctagagagcatggaagcagtaaaagaaaagctattccatgtccctcactcttcggtggtaggaacttttgcctacaaggcccttccagcatcaaaggcagaggcagtgtaggaaacaaagcatggcccaagtccctcttggggcttttattattctggcctctttttagaggaaaaaaaatgattttttgagcttcagacaccatgtccaattaggtttgtatactcattttaacatcaaaatttaggccaggctctgtggcttacacctgtaatcccagctctttgggaggctgaggtgggtggatcacgaggttaggagatcaagaccatcctggctaacacagtgtaactctgtctctactaaaaatacaaaaaaaaattagctaggcatggtggcacgtgcctgtagtcccagctagtcaggaggctaaggctgaagaattggttgaacctgggaggtagaggttgcagtgagctgagatcccaccactgcactcgagcctaggtgacagagtgagactccatctcaaaaaaaaaaaaattaagatacgttactttccagttgtgtaaagaccgttttttaattttgatttgtttttagtgacatattagtagataaccactaagtgtggttcaagatgcttacagggattctgttgcatctagagataggtgtctggtcaggacgtagttcttagagctgttagctcttagagtctgataattaaagtaagctatgtgtaaatgcagaatgagagaatactaatggatcatggctcatatatgcaacagttaaactttttattagctaaatttttcatctggcctaatttttttacccttttcttttgtacatgaggattctttcatttgtatgtaatagaaacaaaaagtaaactaaatgaaaaactaagtttttagatttgacttatgaaattaatcatgccagataatttaaattataaattattgaaaattatttttttaaatggaattttgtctcattttacataggagtaatcagtaagatgttaacaactacttttattttatggtatttgtatcagaagtgaccagtttttttttttttttattcttagttgtagaaataagaagaagcaactgtacaaaccatgtaagtaaacactcaaatagttaagaaattgatagtttgacataaaaggatgtctctcttgatttctttaaattacaatgtggacctggtggtggtagcatggacctctttttgtggattttctaaatctcttctattttcctgagtattaaatttatccagaaaagtgtttagcttagcgtgtccaccttttaaagatttctgacatttaagttaaatttcaatagtctggttcaaaagatctgccttaaggctgggcatggtggctaacgtctgtaatcacagcactttaggaggccaaggcaggctgatcatctgaggtcaggagtttgagacaaccctgaccaacatggtgaaattctgtatctactaaaaatacaaaagtagccgggcgtgctggtgcatgcctgtaatctcagctagtcaggaggctgaggcagaagaatcacttgaacccaggaggcggaggttgcagtgagccaagatcgtgccattgcactccagcctgggcgacagagcgaaactctgtctcaaaaaaaaaaaaaaaaaaaaaagtgccttaaatatttaatcttatttttaatgaaagaacaaaaatagaatagttaagttaattgccagcactgtctattgactttctatcacagcgggtaaaagcgtatcttcctcgctacaccatgatcttatgtttctccctgtgtttcttccaattgtagcacactttttaattaaatcagtaatatttacatgattatgactctgcaaatattattcactgctaagtcatatggtgttttcactgtgcctctgcattccatgtccttcatcctgtctctgaaacagttctgaaatctgagcacttctgcaattctcctggatcttcttttttcctagcctatgttagtttatctatccaaatatcattaagtagcctctgggtgctctgtttgctttcacatccattattttttagcatgaagctaattttctgactatattcatttgcctattttctaatagctgtttttcccccaagtattgtagcatttatcacatgcctttcaaagatattttccatctgcaaaaacacatctgttcctttttatgtgtgtgtggggggcaactttctttggccttttgtcatcctagttcaatatagcgtgggtttccctagatatgctcaatgtctgcttttctgggctaactccttaaagtcttttgggatctcacgtaactgctgtcttgtgtgggatctcctgagtcctagattctgtgtttccttctgtcctgttatcgtctctagttgtacttgaacacattttcctgggtggagatgttaaaatccctcctctttgatagagagtacacctctaggttgaatctaaattgtatggttctgaagacattttgcagttgtgctcttattacagtgttgttcttgaatctattgccagtgtgtgatatgttatttacaaccaggttttagttatctgcggaagctttttagaatctctctctctaaggttctgaaattttataacagcttgttggggatcttttcattttattgaggctactaaacctgcagactatctcttcttgagaattttttttttattttctctgttacttttttactgatagtcttgttcttcagatgctaggctgcttagaccagtacacctgcattgatttttaatttttccccttctatttttttcagtttgtctttttattctagttctgggatattctgtgactttatcctctactatttctattgaattttatattttttgagagtgttttaagattttttttttaaagttttgctcctgattttgactggtcctatcaattccttttttctattgttttgatctcttttcttggaggcttccctccaatgtgtggtggtccctggcctgctttatttggaagcaggatttctgttaactgatagcactcagtgtgaggccttagaagcctgactagcttttcatttgggagacctcagtgtattatctggggatctttactgaagacatttcagtttcttctgagaaggatctcccaattttctgcctggaaagtaaaagcaggcctggaaaggaaaagcagagttagcaaagaaagttggagttccatttttggtgtacagttttctttatatctcaggtttaagccatagtatctctgagccagaaattctcaggtttgatatatccagagaacacacatctaagtttcttgtcagatggaaggacaggtagactttgggctctagttagagatttgcaactgaccttgctggctttttttttttacattttaccctactttccaaagtgccatttgcctgtaagttcacaacctgcctttagttctgcaagacaaactggctcgcttctgttccagtcactttctgtagtcagcaaagttgtgtttctgtgttatttaccactcctttgtctactttttatgtctcagcatttactaaaaattatctctgtcaaccttctgtgctggtcatgggtgtaacctttattttatgactaatgaggcttccagagggagacgaaataaatttgtggtcaatctattatatttaatccaaatttaggacctatgtttaaatcaaagtctaatttgagtataatgatattaagccagagaattttttaaattaatgtatctataataagcatattacacttttctcctaaggccttgtttaatattttcattcaaagtttatccactgccatatgcttcccattacttcacaacataaatggagctgttttcctgaatgcccaaggtgttagaaatatttaagttaattaagatttgttcatttttagcctggtcaacatagcaagacctcatgtctacaaaaaggttaaataacaaattagccaggcctcgtggcatgcgcctttcatattacctactcaggaggctgaggcagaggatcacctgagctcaggagtttgaggctgcagttaactataattgcaccactgcactccagcctgggcaacaaagggagaccctgtctcggaaaaaggaaaaaagttactaattctttaaaaacctatctaaaatttgtcctgcccaaaaggagagtgaaaaatatgaactttagtctttgttttattttatgtttgctgagaaaaatgctgtactttatttatttatttattatttccataggtttctgggggaacaggtggcatttggtgacatgactaagttctttagtgatgatttgtgagatttaggtgcacccatcacctgagcagtatccgctgaacccaatttgtagtcttttatccctcaccctcctcccagcctttcccccaagtccccaaagtccattgtatcattcttatggctttgcatcctcatagcttagctcccacgtaggaaagagaacatgatatttggttttccatgctgagttatttcacttagaataatagtcttacttccatccaggttgctgggaatgccatgaatttattccttattatggctgaggtggtattcctcatatatatatatataatatgtatgtatatcacagtttctttatccgctcattgactgatgggcatttgggctggttccatatttttgtaattgtaatttgtttgagttcctcatagattctggataatagccctttgtcagatgtatagactgcgaagatttcctcccactctgtggttgtctgtatactctgttgattgttccttttcctgtgcagaagctctttagttaagtctcacctatttgtttctgttgcatttgcttttgtgttcttggtcatgaagtctttgcccaagccagtgtctagacgggtttttccaatgttatcttctagaacttttatggtttcaggtcatagatttatgtccttgatccatcttgagttgatttttgtgtaaggtgagagttgaggatccagtttcattctcccgcatgtggcttgccaattatcccagcaccatttgttgaatagggtttactttcttcactttatgttttaggtggctttgttgaaaatcagttggctataggtatttgagtttatttctgggttctctattctattccattggtgtatgtgcctatttttatatcagtaccgtgctattttggcgactatggccttatagtatagtttgaaatcaggtaatgtcatgcctccagatttgttgtttttgcttagttttgttttggctgtgccggttcttgtttggtccatataaatttcaagactgttttttctagttctgtgaagaaggatggtggtattttgatgggagttgcattgaatttgtagattgcttttggcagtatggtcattttcacaatattcattctacccattcatgagcatgggtgtctttccatttgtctgtgtccatgacttcattcagcaatgttttgtagttcccaacggcatatcaaaaagataatcgggccaggcacggtggctcacacctgtaatcccagcactttgggaggctgaggcggacggatcatgaggtcaggagttcgagaccagcctggccaacatggtgaaaccccatctctactaaaaatacaaaagttagccgggcgtggtggcgctcacctgttatcccatctactcgggtggctgaggcaggagaatcgcttgaacctcggaggcagaggttgcagtgagccaagatcaccgcattgcatactccagcctgggcaacagagcaagactccatctcaaaaaataaaaaaaagataatccaccatgatcaaatgggtttcataccagggatgcggggatggattaacatacacaagtcaataaatgtgatacaccacataaacagaattaaaaacaaaaaatcacatgatcatcttaacagatgcagaaaaagcatttgacaaaatgcagcatccttttatgattaaaaccctcagcaaaatcagcatacaagggtcatagctcaatgtaataaaagccatctatgacaaacccacaaccaacataatactgaaagggggaaaagttgaaagcattccccccgagaactggaacaagacaaggatgcccactctcaccacttgtattcaacatactactggaaggcctagccagagcaatcacacaagagaaaacaataaaaggcatgcagatcagtaaagaggaagtcaaactgttgctgtttgatgatgatatgatcatatacctaggaaaccctaaagactcctccaaaaagctcctagaaccgataaatgaattcagcaaagtttcaggagacaaaattaatgtacacaaatcagtagctctgttataccccagaagcgaccaagcttagaatcaaaccaagaactcaaccccttttctgatagctgcaaaaataaactaaaataaaataaagtacttcggaatagacctaaccaaggaggtgaaagatgtctacaaggaaaacaactttagtatttttaatgggttaaaatgagaggcagcaggtacagcagaagtcagtgcgtgggcatccgcatccaatgggtactgcacctttgatggtaaggctttggttttgacttactaaattactaggtacgattattttctagtttttgtcattaaaccttaaaactactaagtaaccccttccatttcttgttaaatattgtaaaatttcatactctcatttatgctgactgacgttagattatttgtttctattttgtgactaccttaaataatacctataaagagtaaactgttagtagtgtttttgctgtaattaaatgtagtaagacttaccttccaaatgatgactgaattgtcaaacacttgtcgaagttttggatttactcaaaattctatgctcagcagctggaggtaggaagagtaagggccctcccttactcttatggagaggcatactttctcatgaggggaatactctgcaggaattagcatcttgtaagcagtggtgaattcaactaattagtgtataaaaatacattttttggtgtggctgccgacaaagagatccaagagggtagatggagtcgagcttgctgaagcaaggaaagagaaaagcagtattctaggcagagagcaggggtagagcaggaaaatggctaggtgcaggtcagatgatttatagaatgcaattgatcaagttttgaagtgaatgcaaagtattctccaagagtctcatttgagtcatgtcttggcagtcttatttaaacatgaagtgaaagttagattttttaagttgtcatttgtttttagggtgtgagagaatatttaagtgatactctttttatcctccacataagaaaataggactagagaaacctatggcttcctcacttgttggtggcctagcagccctggcacacagagcccctgaatctgaaacacttcttttgtaacaatatcacctgaaataatacgtttaggattagtaatttagtaaatgcattagtcttgtattcactgcaataaagtgctcttgtagcaggattatttaatacactacattttatcgtagtaaataaataatagaaggactgggcgccgtggctcacgcctgtaatcccagtactttgggaggctgaggcaggcagatcacgaggtgaggagatcgagaccatcctggctaacacggtgaaaccccgtctctactaaaaatacaaaaagttagccgggcatggtggtgggcgcctgtagtcccagctactcaggaggctgagtcaggagaatggcgtgaacccgggaggcggagcttgcagtgagccgagatcgcgccactgcactccagcctgggctacagagcgagactccgtctcaaaaataaataaataaataaataaattaattaattaattaattaatagaaattcttggctgctttttattgctgtagaaaaaaatatgaaatctcattttaaacttttctttctttttttttttttttttttgagacggagtctcactttgtctcccggcctggagtgcagtggcgcgaactcggctcactgcaagctctgcctcctgggttcgccccattctcctgtttcagcctctcgagtagctgggactacaggggcctgctaccacgcccggctaattttttgtatttttagtagagacggggtttcaccatgttagccaggatggtctcgatctcttgacctcgtgatctgcccgcctccacctcccaaagtgctaggattacaggtgtgagccaccgcgcccggcgaagccgacttttcccattatttttaacggtaattcataaaatccttgttaggtttgatgacaggtaccatattaagggcagcattttataacccatatcttaaacatcatctctggaagttgagagcctccaatgggttttctatagattgcacatgataccacactcaggcagttcatggagtgtaagacatatcttagtgctttgtcatttgacattttaactgagaaaaaaatacactttgataagtttgacttacacttcccttccccttcaggtatctactgagcgtttcagtcaacaatacagctcgtgttcgacaatattccttgatgacagcacagccatccagcattatcttacaatgacaataatatcgtgagtacaactatgctgccgagggacagattcctttattcggaaattatttcagccatttggttgtcctcttcagcaatcagcttaagaaattggagtcaaccatatattgatattcagattctgaatattaagtatcagtttctcttttaatcttagacgtcgtggtggaaggaaaaatcagttagcaaagaagcaaacccagaaacagtgtgtctttttgatgtctttatgcctttagacaatgttgaacacagtgagaaggataggttccctttattgaatgttttttgtggaaacttagtttttcaatgcatcataggcccaaatcagtgtgcactactttggacattatccttggaagaaggaacagcttttcttcttctggcaccacagtgtatctgcatttgaatttctcccattgtgcatgagcacctcgtgggccacaaagatgcgctttgagagcaccctgagatgaagtttattttaaaaggaacaacaaccaacaccaccaccagctccacaggggccgtccagtgtacattattctcatctccttgggttattagtcttgatttttagaacacagtttggaaagtgctaatttagaatattaatgtctttatctttaatttaacttttcattctgtaaacataactagcttataaacaattttgtttcaaatgcactagcctttttagctaattcaattgtcaataacttttacttcaattaaaagtggcaagtttacactcataataatgtcactttcctccctcccttttaacaatagttgagaggaaattgtgtttcaaacaaaaactgaactcaaactctgtctcaagtcctgagctttgggacctattgagtaatcactaaatgtctgtagtcagccaagtctcttaaatctttgagcacacatacacaaaaattactttgactagagtccctggcttcttctgagttccaaagattttgataagttagcatataattcaaaagcagctttgaagattaattttgctgaaactaattttgtgcttttttcctcattattctactttttagaagtctacttttgagagtatagtaagttttaatttgccaccagcaagtttgagaaataatcatttggtgtattcactattggtgaaataaagttattgaacaaattaatagggcaaattggcttcaagaagatatattgaaaaatgttttatcatgaatcagtagtgcactgttgtcagtgggataggtggaactcgctgagatcacttatgcaaggtttttttcaaaatgcaagtctgcaaatacatgtatcttcccatctccactttccctctatctctaggcactgagaagccttttaggaaaatcgggatggatgtgaggcatctttctgtgaagaaaagcatcccagaagattctgattttcaccccagctcaatcattccaaactttgctgctgattgaaatcacctgggaaacgtttaccaagaaccttgatgcccaaagccatacccaatactaattaaattaaaatgtctcatgtggaagatgaggcagatattaaagcttctcaggcgattttaatgtgcagcaaagtttgagagccactgcttaatttgagtttaggacgagaaactgctcctatttggtgggaccttgggcaagtcagttttaaggtttgtttccctgatctgtaaaacaagtgttgaattaaatgtcacataaggtcattggtcctttccagcatgtaactttaaattctgtgattttaaaattatttcagagatgaaaactacttgaagcactatagacatatccatctcacatgctaatgttacaggctttttaaaaagtgctaatattgtgtagacctattagtagaattgagatttaccttccctcagttgttttgagcctcactctacaaaattagctgggtgtggtggtacatgcctgtaatcccagccacttgggaggctgaggcaggagaatctcttgaacccgggaggcagaggttgtggtgagccgagatcacaccattgcactccagcctgggcaacaagagcgaaactccacccaccacccccccaaaaaaaaaattatctgggcatagtggcgcaaacttgtagtcccagcttcttgggaggctgaggcgtgagaatcgcttgaacctgggtggtggaggttgtgaggagtcaagatggcaccactgcagtccagtctgagcaagagagacagactctgggtcaaaaaataaataaatacataaaataaatcgcatgggacgaaaggtttcatcggtagaaaagcatataaaagggaaatctgttattatttatatattgtaatcaccaacagaaacgcgtcttctaacggcatatttccttgcattttggttctcatatttttgtaaaaaacaaagaaatgaaaacaaagtgcccttatggtactgttctgaactagaagatttgaatttcagggccgctaggagagtttcctctgccccccttttaaaaaatgtctgcaggcctaacaaatgataacatctattgttatgaatttgttttccttccacagtgtgaccttggagatacctcatcatatcacacaaaggtgagctttttagaaacctgtcttgttattctagctaattactttgcaagatatcaagctcagtgttaggtcacagctctagacatcataagctgtattgtgcctactaaaatatcgaagcaaattatttgtattttctttgttccttaagactctcataattcttaaatgattgagaatctcaaagagtatatgtttatattgattatattgatatttagtgtggtagaattatacaattgaaattttttcaaaatctatttttagtttagatttcacagccttaccactgttgatattatgggctagataatgctttgttgtgaggactgtcttgtgcattgcagagagtttagcagtattcatggcctctaccaactagatgtcagtagtaacccatgacccagtttataaaaacagaaaatattccttgagaacagtattgttaacagaagtttttcattgaaaaaaaacttttctacaacaaaaagttgagtaaaaagtgtgtcatttgtttatattatttaaagtctctcatgttgagcttaataggagacaaatggattctctagagctttctttgcaatttgcttcaaagaagcaatatgaggctgggcacagtggctcacgcctgtaatcccagcactttgggaggctgaggcgggcggatcacaaggtcaggagatcgagaccatcctggctaacacggcgaaaccccgtctctactaaaaatacaaaaacttagctgggcatggtggcacgcacctgtagtcccacgtattctggaggctgaggcaggagaaccgcttgaacttgggaggcggaggttgcagagagctgagatcgtgccattgcactgcagcctgggtgacagagcaagactctgtctaaacaaacaaacaaaaaaagcaataagctggtggggcgcagtggttcacacctgtaatcccagcattttgggaggccaaggtgggtggatcacttgaggtcaggagtttgagaccagcccgaccaacatggtaaaacccgcctctactgaaagtacaaaaaatggctgggcgtggtggtgcatgcctgtagtcccagttacttgggaggctgaggcaggagaatcacttgagcctgggaggtggaggttgcagtgagccgagatcttgccattgcaccccagcctgggtgacagagagagactctgtctcaaaaaaagagaaaaagaagcaataagatgacctaacctcatgcaaatatgtagttggtagaaggtgtatttttaaagttttcagacagttgtgggtatttgttaaaacactaaatcaaaacttcacaagtggtggtttcttaaattagttacggtggcattttacatattaataaatttattccatcagtactcattgatctttcttgcacagtaaatggatcttttgctccatacttgcatttataatatcatgcattagttacttggaatatattggtttatgttttattgtgtcaaaaatcacttttagtttaaccaccaatcttactttaacaggcctttaagtattgaaaagctgccaagcctacagtagaaggaacaagtttttcaaagtccacaggaaagcttaaattttatcattgggaacaaatacgtatttcccttgaagtgacaacctctcacttcatttatttttgagaatgatagttgaactggttttttagaccgagtttcactctgtcacttggctggagtgcattggcatgatctcagctcaagcaatcctctcacctcaggctcctgtgtagctgggaccacagatgtgtggcaccacgccaggctaattttcttatatgtttgatagagacacggtttcgttatgttgcctaggctggtcccgaactcctgaaggagctcaggccatctgcctgctttggcctctcaaagtgctgggattttacaggcgtgagccactgcgctggcccagttgtacttttaaataaaaatgatgttctgtgaaaaaagtgatttttcagttcacagttaaatcacggattctttaaaaacaaaaaaaaagcacttctcattaactttccacttattcagaatattagagacatgtcaagatttaacaacattaatttttattgcttcatcaaagacgttcttaagaaattcaggctatgttttttacctgtaggggacagtgaagaatagaatgactactaatgtaattggtaccactgccttgatttatgctgagaaaccagccattgtacctacttttgcttttatacaatcatggcaagtgtcaacgaaaaagcaggcaatgactttgtattactttcacaaatttttaaaatttttcatcagctttctcaggtttaattagtatgattcagaacagtgttggccaggcacagtggctcaggcctgtaatcccagcactttgggaggccgaggcaagtggatcgcctgaggttaggagttcaagaccagcctggccaacatggtgaaaccacatctctactaaaaatacaaaacttagccaggagtggtggcaggtgcctgtaatccctgctacttgggaggctggggtaggagaatcacttgaacctgggaggcgaaggttgccatgagccgagatcgcaccattgcactccagcctgggcaacaagagtaaaacttggtctcaaaaaaaaaaaaaaaaaaaaaaaaaaagaacagttatgacctcttaggccttctggaaggggtcttcgggatcccgagaggtccacagagcacatttggagaaccactggtttatacacaggcacaatgcattagttttacaaagtttaaagttcctcaaagactggcctcttaaaaaggtagatgagtttgtcattcagacaacagaaaatacataaaaacatcatgagagtatactacagagaactaaagagaaaggaagctaagaaatctgaatcacatttacatttattaaagtttactactactgctttgtagaacattcttgtgtttcaatgtgtggttagaagagtgaaaatatgtttggtttattgccatggcctgttagggagagtcaatactcatgggcatttctgactggttatcatataaaaggcttcacggtacagaccatgatgtgctgagaaagaagaagtcaggaaaccctctgcaagtcaggatccaggagaagaatttgtaaaaactgctttggtaaagtaaacaccaaagcacacaggaggaagtattttactcaacaaatattatactaagatattaacagtttttgaagtaatgcactttcttattttatagagatgcagatagatctttgagcatacctgatgaacagttacactcatttgcggtaagtggcacttttattgaggttgtattttcatcgtacacttgtatctgtttcatgctgaagtcaaagccatctttttttaaatcttccccatttcatgttgcatttagtcatcttaagtgttgtaaaaagaatgtgctggagtaagaactgatctgcagctctgtttagttagtgagctagtgtgagtaaatatactatccaaacaacagaaaatgtatctttttttttttttttttttttttttttttgatggactctctttctgtagcccaggctggagtgcaatcgcgcgatcttggctcactgcaggctctgcctcccaggtccctgttcaagcaattctcctgcctcagcctcccgagtaactggaattacaggcatgtgccaccatgcccagctaatttttttttcttttttttttttttgtaaagacagggtttcaccatgttggccaggatggtcttgaactcctgacctcgtgatccacccaccttggcctcccaaagtgctgtgattacaggtgtgagccaccatgcctggcccagaaaatgtatctttttaaaaggtaattgtgagctgtctataggatcctgcaagccactacccaatttttgaagccattcctcctcctgttccacacaggtttccaccgtgcacattatgaagaaaagaaatggaggtgggagtttaaataactattcctcctccattccaccgactcccagcaccagccaggaggaccctcagttcagtgttcctcccactgccaacacacccacccccgtttgcaagcggtccatgcgctggtccaacctgtttacatctgagaaagggagtgacccagacaaagagaggaaagccccggagaatcatgctgacaccatcgggagcggcagagccatccccattaaacagggcatgctcttaaagcgaagtggaaaatggctgaagacatggaaaaagaaatacgtcaccctgtgttccaatggcgtgctcacctattattcaagcttaggtgattatatgaagaatattcataaaaaagagattgaccttcggacatctaccatcaaagtcccaggaaagtggccatccctagccacatcagcctgtgcacccatctccagctctaaaagcaatggcctatccaaggacatggacaccgggctgggtgactccatatgcttcagccccggtatctccagcaccaccagccccaagctcaacccgcccccctctcctcatgccaataaaaagaaacacctaaagaagaaaagcaccaacaactttatgattgtgtctgccactggccaaacgtggcactttgaagccacgacgtatgaggagcgggatgcctgggtccaagccatccagagccagatcctggccagcctgcagtcatgcaagagcagtaaaagcaagtcccagctgaccagccagagtgaggccatggccctgcagtcgatccaaaacatgcgtgggaacgcccactgtgtggactgtgagacccagaatcctaagtgggccagtttgaacttgggagtcctcatgtgtattgaatgctcaggtatccaccgcagttttggcacccgcctttcccgtgtgcgatctctggagctggatgactggccagttgagctcaggaaggttatgtcatctattggcaatgagctagccaacagcatctgggaagggagcagccaggggcagacaaaaccctcaataaagtccacgagggaagagaaggaatggtggatccgttccaaatatgaggagaagctctttctggccccactaccctgcactgagctgtccctgggccagcagctgctgcgggccaccactgatgaggacctgcagacagccatcctgctgctggcacatggctcccgtgaggaggtgaacgagacctgtggggagggagacggctgcacggcactccatctggcctgccgcaaggggaatgtggtcctggagcagctcctgacggggtggacgtcatggcccgagatgcccacgggaacacagcgctgacctacgcccggcaggcctccagccaggagtgcatcaacgtgcttctgcagtacggctgccccgacgagtgcgtgtagtatctgttttatttgactgcagtctccttggtgcaaaaacaaaatgggaaaaataaggataactcagaatttcaaaaggaaatcacaaattcagctagtaatagcattttcagtacttttcgtaaactaagtaaatacacaaaatgttgatttttctgaccataagacatattttatgtccttttgccaaggtggatgtgttagtctcaggccctcctggccacattgcccaagtcacacaggcttctgtattatgtatttagataaaatgtgtgaaaatatatttgaaaaaaaatttcataaatgtgcattgatttttgtacacatggcacctctttttcatttttatttttatttttatttttttggacgatgttttgctctgttgccccagctggagtgcagtggcatgatatctgctcactgcaagctctgcctcctggattcacaccattctcctgcctcagcctctcaggtagctgggactacaggtgcctgccaccacacctggctaattttttgtatttttagtagagacgtggtttcaccatgttagccaggatggtctcgaactcctgacctcgtgatccacctgcctcggcctcccaaagtgttgggattatgggggtgagccaccgtaccaggcccatggcacctctcttaatttataaattgaactggatgtgaagtaataatgtcagctagttgagataagagggttacagttaggctgggcgcagtggctcacacctgtaatcctagcactttgggaggcctaggcggactgatcaccaggtcaggagattgagaccatcctggctaacatcatgaaaccccatctctactaaaaaatacaaaaaattagctgggaatggccaggcgtggtggctcacacctgtaatcccagcactttgggaggccgaggcaggcggatcatgaggtcaggagatcaagaccatcctggctaacatggtgaaaccccatctctgctaaaaatacaaaaaaaaaaaaaaattagccaggtgtggtggcgggcacctgtagtcccagctactcgggaggctgaggcaggagaatggcgtgaacccaggaggcggagcttgcaatgagctgagattgcaccactgcactccagcctgggcgaccaagcgagactccatctcaaaaaaaaaaattagctgggcgtggtggcgggcacctgtagtcccagctacttgggaggctgaggcaggataatggcatgaactcaggaggcaaagcttgcagtgagcagagattgtgccactgcactctggcctgggcaacagagcaagactcggtctcaaaaaaaagaaaaagagggttacagatcattgcacatggaaaatattcccagcagtaaccacttccattaatgtgatctacagcttttaaaaaggagcatctcagaataagatggtggtacaatttgcttattgagaaaggaaaaaaaaaaacacatgagtatattacaaagggaaaagaaggaatgtgatttctcatgattgaaagcttgatttagattgcatacagcttttgctacccaagaccaagaggctctggcaagacagggtggttttccgaatgccagactgaggtgccttatgaaggcagctgccgatggttccagatgtagagagataggtgatgcaggagggaaagctggattggaaaagggagagttttgtagacgggctacgctcattgtgcctttgaaagagcagagccggcagcctctagtcatcatttggatatacaggactagagcatgaatctgatgtagagctacagaatgaagagcaacagcagctgtttaaataccaagaaagtgtgtagaatgaaattggacaagccaagcatggtggtttcatgcctttagtcctagctacttcggaggctgaggtgggggaattacttgagctcagcagtttgagttcagcctgggccagatggtgagaccctgtatcttaagaaaagaaaaaataagaccaggtgcagtatctcatgcctgtaatcccagcactttgggaggccaagttgagaggactgctcgagtgtaggacttcaagaccagactgggcaataaagtgagacccatttctaccaaaaaaaaatcaagaaattagctggacatggtggcacatgcctgtggcctcagttacatggcatggcaggctgaggcaggaagatcacttgagcccaggaggtggaggctgcagtgacccatattcatgccactgcactccagcctgggcaacagagtgagaccctctctcaaaaacagataaagtggacagaaaataggtcagtaaggactaatcatttaagggacaagcccccagaagagtggctactagagtgggaggaggaaaagcagaaggagaaagagttgaagataggcgaggctgtggtcccagtgctgaattctgccaagcagtgacttgattcatgaacactcactggatgctgactctgtttctcttctgagtgctggggtagaggagaggagaggtggagcacagttcttgcttttatgagcttatgttctaggaagttcaagtatttttttcaggtagtatgaaatagcaggaagaggaagcaggctaaagggacacagagtgattgggggctattttaagtagaatgataaggaagagcctgtctagagagctatttgaacagtgacctgactgaagggacaacagaaagcagtgctgacattacaggtagcaggatgactgccaagacagaaacgcatttcatatgtgtttgaggaacaaacagcaaggtgaccagcatggggagagtgaagaatgagggaaaccttgaatgagaataaagcaattccatcttggatgctaatctgccatattctgattaatcccagttccaacaattcatctacgatttctattttatctttttaaaaaaattattttttattttttattttttgagaccgagtctcactctgtctcccaggttggacttcagtggcacaatctcagctcactgcaaacttcacctcctgggctcaagcgattctcctgcctcagcttcccgagtaactgggattacaggcgcctgccaccacgcctggctaatttttgtatttttagtagagacgaggtgttaccatgttggccaggctggtctggaactcctgacctcaggtgatccgcccaccttggcctcccaaagagctgggattgcaggcgtgagccaccgtgtctggccatacacatccctgctgaagcccgcattacccttcccctatgctatagaagccctgggtcgggggggtgggggtgatggcacagggatccaccatcttatcttggtgccatccctgacttgccttctgttcataaacgcctattaaatgtttctttctgagaaactggatttgtcagcctctttctttggtatctcaggttccttggcctttgcgggtaggtttatatagacctgctcagcacaggacaggcagtttctcaaaaaattaaaaatagaattaccaaatgatccggcaatatcacttctgggtatatagccaaaataattgaaagcaaggtctcatagaaatatgtgtacactgatatttatagcagtggtattcacactcgtcaaaagatggatgcagcctagttgtccataggcagatgaattgataaaatgtggtatatacatacaataaaatgttcttcagccttaaaaaggaaggaaattctaacacatgctacaacatggatgaacattgaggacattacgctaagtgaaataagccagttagaaaaagacaaatacggtgttccttcacttatgtgaagcgtccagactgagtaagcaaactaatagaaacagaaggtagaacgggggttgccagggacatggggaagggagaaaatgggaagttgcttagtggatatagagttttggttttgtcagatgaaaaagttccagagattggttgcatggcaatgtgaatatacattacccaacccaagggctctccttgacccctgttccaactgccacttagaagtggttaaggtagtaaattttatgtatattttaccacaattcaaaatagaattattattttttcattataattttttgagatccctcactctattgcccaggctggagtgcaatggcgccgtctcggctcactgcaacctctgccttctgggttcaagtgattctcctgcctcagcctcccaagtagctggaacttacaggcacatgccaccatgcccaactaatttttgtatgtttagtagagacggggtttcaccatgttcgccaggctggtcttgaactcctgacttcaggtgatccgcctgccttggcctcccaaagttctgggattacaggtgtgagccaccatgcccggctgtcaaaataggtgttttgttgttgttttttttttttgagatggaggtttgcttttgttggccaggctggagtgcaatggcaggatctcggctcacggcaacctccacctcccgtgttcaagcaattctactgcctcagcctcctgagtagctgggattacaggcatgcaccaccatgcccagttaattttgtattttattttagtagagatggggtttctccatgttggtcaggctggtctccaactcctgacctcaggtgatccacccaccttggcctcccaaagtgctgggattacaggtgtgagccattgcgcctggccttttttttttttttgtgatggacttttgctcttgttatccaggctggagtgcaatggcacgatctcagctcactgcagcctctcctcccgggttcaagcaattctctttcctcagcctcctgagtagctgggattacaggcatgcaccaccatgcctggctaattttgtatttttggtaggtatggggtttctccatgttgatcaagctggttttgaactcctgacctcaggtgatccacccacatcggcatcccaaagtgctaggattagaggcatgagccactgcgcctggcctgaaaaaaaattttaacgtttgagaaaatacaaaattttcatagtctccaagtatttctcctaagatctttccccctatgagggggaaagatagtatctttacaatggagaaacccagcagaaacctgaaccaaatgaacaagttcaacatcatcagtaagaagaactatcaatgccataactctgatggaatgcactgggaaggattccacatcatttttgtgctgtaattgccaaaagttcgtaacttcagtccaatcatggaaatacatcagacaatcccaaatcgaggaacatttcataaatactgatcagtactggttcaagatgtcacggttatgaaagataaggaaagattgaggaactgttattgcagtcctacaaaacggcgagagactaagaaataactaaatgcagcgtgatcctgggtggaatttgggaacagaaaaaggacattagtggaaaaagtggtgaaactccaataaggtcttttgtttagcgaatatgttcattttaaatcagttaaattatttaaatatatttaaacattagttaaatgtatttaattaaattaataaaattggttattttgtgaaataattttaatatagttaaatatgagaatgtggatttcctggttctgatcaccgtactgtggctatctaagaggtgcatgttcagggaggctgggggaggaataaatggacattatactattaagttggaagagagaaacctaccccatcagtcacaaaaccctcacattcatggcagtgtgtcggacgttccagtatgaatggcatttcccagatgtcagcgcgaggtccctgtggagggagtggggctccctgggaatctagtggagagcattcggggctcccttcctcaggagcctgcccttcctgcacagaagcgtcagcctcacctctgtaccactgcccctctgcctctcagaacctactcggcttcaggaagattctactgccagcctcctttcccagatacagcctccagggactcagccctgccttcccaagtgttcccgcctctcttgggaaggcgtgctctcagatcccacacccctggacttccccgggcaccacctgctccttcttcatttctccagctctgcgttctcactctgagggtcctctcctgctgggaatgtgtgttgctggcaacagtgaagattcccccctgggttgccccccatgccctgttcttctgcacttccctggcttcctgcgttggttctgctggtgtctcctgcttttgggtttacgtggcttcccagcttcctaatttctctgaagttgagtttgatgtgtgtattgatgatgggctttttcctcctcctcctcctcctcctcctcctcctcttcctcctcagtcttgttgttgccccatatagtttccagaaggagaaaagggacactgtaaaattaagctgctgcaggctgggcagtggctcatgcctgtaatcccagccctttgggaggccgaggcaggtggatcacctgaggtcaggagttcaagaccagcctgttcaacatggtgaaacctcatctgtaccaaaaatacaaaaattagcaaggcatggtggcatgtgccggtaatcccagctactcgggaggctgaggcaggaggatctcttgaacgcgggaggcagaagttgcagtgagccgagatcatgctactgcacttcagcctgggtaacaagagcaaaactccatctcaaaataataataataataataataataataataataataataataatgccatgtttctatcagacccagaaatcccgcagagtgagctggaattctctgtttctctgtttcccctccatacccactggctcctctctgcccactccctcttggactgcatcaccagggtgcctcactgtctggccctagtggaattcacacagtggaggacgtcataggaggtgggagagagagagagaggagaggtggttattcgctcagattcttccttgttggtttggcagtggccacatctttctactgatggctgcagctcctgatgatcctcctctacagccacagctctctttgggatctgtggacacctttcctgtccctctagacccagggagataacagctcccactcttgctggtccaggacattcctcatctcttattggttcccttaactcggtccacacttctgtgaacagcccctttcctcaagtacccattcgaatatgtcctctggcttccaccaggagcctgactgatacccacaggtgggtgaatgctggcgtgctgctgggcccctcttcctctggtgactggccagccaagtctccaggagtctcgttagggtgggcaggcggtgggcacagcacaaactgtgagctcaaatccacagaacaaaagtgggagaagacactggcaggatggaccgccacaaaactcttggcattcgtgacgtctgtcctttaaatcacgcaaggcatcatcatgcttcagacatgagacagcctaagtatttaagtgtttcaaataaacaaattgtttttcagaattggtaattgctaagttggcaaattgctattggaaacgttggctgtccttgactcagtgattcagccagctagtcccttgccaaactagtatgttgggcaaattccaccttgagaatttatctgctcctgtcaaagccagattctccctgcctgaggggaggctggacttgaccttctgactcaggatatgctgacttgggtccctaggtccaagggcggccctcttgggcccactgtgggctggacctcttccatgatggggtggtggagggcaggccccacctgattcacacttgacctcatccaggcaggtgaagttccctgcaggagtcacctgagcccagcccctcagaccaggatccatcatgtttaggaggatttggggctatctcatgttctttggctagaaaggggtcccactcttaggggtctgccctctgtggggcacagatggcttgctggggcccatggacggggctgggtgaatgggaatctggtcacagcagcagcagctggaaggccaagagggagggcaccagggcctgggacccatgtcttgtcctgggcctccccgggcctcttgccttctccccagcaggcatttgggatctgtgtctggacccagcctcgcccagaaggccatggtgtgttgtcattagaatcacagtgctcacaccaaggcagtgcattaaattagcagggcagggtctcatgggcaggggaccatgtggagggggtggggggaagggcagttgtccccagaggccatggtgggcctggctctgggctgggcagtgggccagggtcctgctgtgtggatgagctctgacaacaggctgtctgggtctggtgagctcctgaaagcggggactggtggagagtaccctagggtgggagctcatgaggagggggtctgtggggtctggaagccattctagagcaggcagatgacatttatcaggggagcaggcatagaaaggacccttgtgtgagtggggggacacacagcctcagaagaaacagggaaggggctttgacaggtccagggagaatccctgaggtttcctagaacaattcccaccagccatgtcccaggtgtcaccccatcccccaggcctctgcagtgccagcccaatgccctgggcaaagcatcctggactctggctgttacaaaaggaggacagggtcatctggacccgcctgagctccaggcccccgactttcacagccccttctgggtccagaagttcatacgtatataaatgaaaaatgtgcaagaatcatattattgtattctttttcataaagaggcccctctaaattgttgaagccccgattcacccctgcccaaaggagacagcaatggcatgtgtggggccacagtcttgagacccagaggtcctgctgcccacgatacccactgtccaccctagggggactggccgtagccctggagcccgcaaacaccatgcaggaatgcaagagggtctcagctcccgagtcccaggctgggagggcccacagtccagtaaactaatcaggccccgacacatccaggagagcagctccaggagcctgcattggggagagagcctcagacccctgccacaggcctgcaccccagaagtaggagcatgggaagacctctccttggctcctggccagcagaagtcacattccccagccctctggctccaaggcagcctcacgtcccagtcactccttggcacaccctaccagttggtcagagctcactgccaaagggcacctcaatgatgagtggagggaacaggtgtttaccaggagcttgcatgctttgcctcagggatgattagggacacagccaagaaggcacgctatgcccattttacagatgaggaaacggaggctcaggttgggctggtgactaagggaagcagcatgtggcaggtggcttgaggcatgtctgtccatcatgagtaactagggagcagccctgccactcctcatgcgatgcaccaggagccagggaagctgcttcctaggggattctagctaaggccagaagcatctccctgagtggtggtggaggcctctgtctactcctccaggactgccaggggataggagggcactgctgacctcacagagcctcttgggtgagtgagcatcagctgagcgacaccaggtgactacgcttctgcccagtgctgtgcccccctctgactcgggcaaggcaccaccctgaacgccccaccctgtcccatggaggccgcaaactgctctgcagagccagggtctccaggaatggggagggcagtcaccctcattccacttgtgttcatgactcaaaggactgcccaggtctccaggcccatagaacccccaaacctcttactaggccacactggggaccttgagcagcaggcttggaatcctaggccttgtctccaggtacatatcagtacccaggcttgggaagctttggtctcaggggggctggcactcaggccctctgcctcaaggaagaagcatgtccagatctctactgtccagccctgctccctgcccctatccttcacggggtccctaggacagggttacagaagcctcatgctgtcaggggatgctgccaccctagttccagggtggctccgcccagccccttcctgctgccgccctcactgactcacctgtccagcctcctactgggctggggtgagggcttattgccccagagcctagataggcaccagaggcagctataaaagcatgttgggccagtcctcagcatcctagttcgccactgtctgctgccacacgatgctgggaggcctggggaagctggctgccgagggcctggcccaccgcaccgagaaggccaccgagggagccagtgaggacccagggctcctttctacctgggctggggggatctggggcagactgggtctgtgggaggcggatctacgtaggcaggcgaggacctgcggggaggccttggcccctcaggaaccctggtctcctgctctaccaagtcagcacggagttgaggggtgcagacctggggaggtctcctgggggcagggcatgagtcctggtgctgggtgaacactggcagcttggacccttccctctggaaatctggggagcctttcttgtcaaaacagcctattctgaataacctatgcaggaaaaggaagatggatttttatttttaccataactttaaagcttcaaagatttcttaacaagtcaccaagtctgttcaaagtcaaaaagggcattttcaatttcatccaagtcccctaaagcatgtttatttttatttgtatttgtatttgaaatggagtcttgctctggcacccaggctggagtgtagtggtgcgatctcggctcactgtaacctttgcctcctgggttcaaagtgattctcatgcctcagcctcctgagtagctgggattacaggcacccaccaccacgcccgactaatttttgtatttttagcagagacggggtttcgccattttggccaggctggtctcaaactcctgacctcaagtgatccattcctcttggcctcccaaagtgctgggattacaggcgtgaaccactgcacctggtcccgaagtgtatgttgtattcagaggtcagcaggtatgtgtggggaggcccagccaggccccactcatgggtcatcgtgtgaaaaagtcttgcctgagtttgtgtcctctttctaaatggcagcagatgcgtattttgtttttgactctgcagctggtgtggaccacctgctttaacctttcactagcctctgagttttttatgattcctgttgggagaaaagctcagcgttgggagaaaagctgaggcagggcttgctagacttgctggctccttgcttctagcactgccattctctcaagtagccatatgtttctcattcacttgatacactgtttcctttcaacctccacatcctcaccacctgtttctttgttagatcaccaataaatagcgtgggctcccagaactcggggccttcgcagcctccacactcgcgatagcgccctgctcccattttctctctcgaactgtctctttgtcattcctttgactccgctggacttgccgcccccgtgacctggtgttgggtctcatcatcccaacagattcccattctaaagatgagggaaccaagaggtggaaggtagagttagaataagaaccatttcttctgactctgaaatccttcagttctagcacgctaccacccacactttaaaaaactctgaagtaggcagagaattccgttttgttggaggaattgctttgagagacctggtcttagtggatgaggctttggaaaccaacctgaggcaggcgctagcacatcctgagaggggtgtgacctggcacacaggcccagcctgggcttcatgtctcagctggcaagactgcctgctcattgccattccaggccgggcagggccaaggggcttcagggacccatgccctcatggggctcattgagctcgtctcccagcagccaaggccctggcgtctccaaatgaagccagctgtgggggaaggtccttctcatgagtcagtctgtcctggctgggggtggcaccccagagccccatctaggatgcccagggatgtataggtctgttgtgaggataagccagccctgagccctcaccctggactgggagggcagtgggcctgctctgagccctcaccctggactgggagggcagcggctctgctctgaaccctcaccctggactcgggggcagccggcctgctctgagccctcaccctggacttgtctcctctgttcagttcatgccgtggaggaagtggtgaaggaggtggtgggacatgccaaggagactggagagaaaggtacagccggctgaggtcgggcagggaaggagggagggaggaagggaagctaggtgctgggccaacctgttctttgactaaccaggtcaaactctgcccctaatgttgcagcctttcagagcctcttggctggggcagttatctatgctcatcagaggccacagactgtactgcgttaggacactgtctagatggttctctctgtggaataagaagacaaagtcacacaagactatgtgacagcacactgggacaaaacatttaacatggcagggtgcggtggctcatgcctgtaatcccagcactttgggaggctgaggagggcggatcatgaggtcaggagatcgagaccatcctggctaacacggtgaaaccccgtctctactaaaaatacataaaaattagccgggcatggtggtgggtgcctatagtcccagctacttgggaggctgaggcaggagaatggtgtgtacctgggaggcagagcttgcagtgagcctagatcatgccactgcactccagcctgggctacagagcaagactcggtctcaaaaaaaaagaaaaaaataattgctgggggcggtggctcacgcctgtaatcccagcactttgggaggctgaggtgggcggatcatgaggtcaggagatccagaccacggtgaaaccgcatctctactaaaaatacaaaaaattagctgggcacggtggcgggcacctgtagtcctagctactcgggaggctgaggcaggagaatggcgtgaacctggaaggtggagcttgcagtgagccgagatcgcgacactgcactccagcctgggcgacagtgtgatactctgtctcaaaaaaaaaaaaaaaaaaaaaaaaaaaaaaaatttaacatgtaaaattctatgttaaatgttaaattgatgtgtgtgagctatgagtagtactatgtacaaagcatgtgtatatctcattccttttcaacaaaatagattccaggtagatgaaggacttacatttacataaatgaatttattaacttactaggagataaacatcttagctcaggctgctcttataaaataccataggccaggtgcagtggctcacgcctgtaatcctagcccttcgggaagccaaggcgggtgggccacctgaggtcaggagttcgagaccagcctgaccaatatggtaaaaccccattgctactaaaaatacaaagaccagctgggcatggtggcacatgcctgtaatcccagctactcaggagtctgaggcaggagactcccttgaacctgggaggcggaggttgcagtgagctgagattgcaccactgcactccagcctgggtgacagagcaagactctgtctcaaaaacaaaaacaaaccataaactgggtgacttagaaacaacagaaatttatttctcacactcctggaggatgggaagtccaagatcaaggaaggcactggcacatttggcatctggtgagggagtctttctggttcatggatgggcccagctctgtcctcacatggtggaaggagctagctctccgtggtctcttttatgtgggtgctaatttcaacctcccaaaggccccaccccttaatatcattacattaagactgaggatttcagcatatgagttttgagggggaagacatcgtaaacatttagacatagtaataacatcagagactttggcctaatcttggagaggggagaatctttagaactatgacaaaaaaatcagcgccataaaggaaatattaagtaaatttgacaatccaaaactgaaattttctatagccaaaaaaaaaaacactataaaccaagccaaaagaaaaattatacactgatgaaaaatatttgtcataaaaatgataatccaatataacaacccaatataaaaatggtcaaaagacataagcaggcattttccagaaaaaaggataagcaggcaatgtacccatgagtagatgctcagtctcactcacagttgaagaaatgcaagttgttggggaaattaaaaccaaattcaaattcattctgcagtaatcctgctgcccttggtcccatcgggccactccagagactaatccattaagatggccacatcccacaggccactcaaggggacacaagttcagcaggtggatcactaggacattcttcctctttccaacagccattgctgaagccataaagaaagcccaggagtcaggggacaaaaagatgaaggaaatcaccgagacagtgaccaacacagtcacaaatgccatcacccatgcagcagaaagtctggacaaacttggacagtgagtgcacctgctaccacggcccttccccagtctcaataaaaagccatgacatgtgtacattgagcgctggatttattcccatttggatggaaacactaggcaaagtattttcttgttgacataacatattttacatatttatggtgtacacttaagtatttattacatgcacagaatagtgatcaatcagggtgtttggggtgtctatcaccttgaatatttggtattactatgtgttgggtacatttcaagtcccttcttctagctactttgtttttttgtttttgtttttgtttttgttttgagatagagtcttgctctgtcgcccaggctggagggcaatggtgtgatctcggctcactgcaacctctgcctcccaggttcaagcaattctcctgcctcagcctcccaagtagcttggactacaagcgcaggccaccatctctggctaatttttattattattattttttattgtttttatttttagtagagatggggtttcaccatgttagccaggctggtctcaaactcctgacctcaggtgatctgcctgcctgggcctcccaaaatgctgggattataggcatgggatactgtacctagccttctagctactttgaaatatacaatacattgctgctaactatagtcaccctaggtgaagtatttttcaacagaaacactttgcatgtcccccgtgtctcctctgctgaggtggacactggcactggggcccctgctgctggttggataggtcctcatgatgaaacagatgcttctctgtcatgctaagtaagatctttcatgtcaggaaggggctcttctggaagaatagttagtgtctgtgcttcatttcctaaaaaactgtttcaccagaaactatatacaactttcaggtgcctcagtgcttcaagacatgctaagggaggaccctcatttgtcttgcatgtttttgggatttttcttgagatgttcttgcaggactcagggcagataacagaccagcttgatgaagaatttagcaaggaaggcccccactgagctgcttcctgttctcgcagagatcagataagcatttctgctggacggttacagaatctggtcaaggagagactgagtcactgctcatcatcctagaagctgctgttgattttttttttttttaaagacggagtttcactctgttgcccaggcaggagtgcagtggcatgttcttggctcactgtaacctctgcctcctgggttcaaacaattctcctgcctcagcctccccagtagctgggactacaggtgcccgccaccactcctggctaattttttgtatttttagtagagacggggtttcaccatgttagccaggatggtctcgatctcctgacctcatgatccacctgtcttggcctcccaaagtgctgggattacaggcgtgagccaccgcacctggcccagaatatttatttagagactgatgtcaggcctaagtgttgatagtgggtagtagtgggcaagatgcctggccctctctccttctcatgagcaagtcagtatcatagaggttaaacatatctttaagtagcatttaacttaacattttttaattaaaaaaaagagaagtaatttgtaaaaatattgcatcccctatttctcttgctggaagctatttgttcttagcagaaatgagaaaaaaaggtgttttgcttaaaaaataagtgagttgctcaccatacttctggatctcatctagaattggactcacagtttgtgaacagcccaggtatagccaatgtcttagctttggaacgcttgccactttccagctacagctgaaccttatatcctggtttggttcctgatgactttcaaattctcctgacccaaacgcaagctcagaagcacaagcacattgttggtggcagtacagactgaaacaccctctttggatggcagttcctctcacaggactttattctccaggtatgcacaggcacacacaggtgcccaaaggataaacacacagatctattgtagcatatttgtattactgagagattagaaacatcctaaaatgttaaccaaatcgcttggatgaaaagttttgctctgcttattaggtttggcgtacaatatggaggtgacatctgttacttccagtgtattatagatactttagctccaaaaatgatacctgtacctagatgggcaccaaaagggaatggttaacaaatattgcatatacaggggtatggggcagctccggggctggggatggcggcggccaggtttgcagcggctccaggatgagcgggtggatcccgggaagcgtggtgaaatgggctggctcccgagccagccgggaggacgcttactacagctgctcagaagcaccactggaagctcagatgtaggtgccccagccagaagcagagaggggttcagagaagctacagagaagcccctcctgatgccccagggagcaagccaactccttccaggctccaggaacaccacaaagcaatatgaaacctgttcatgagaggaaccaggaatgccttccaccaaagaaacgagacctccccatgaccagctgctccactaaccacacatcctccagtgatgcctctgaatggtcccgaggggttgtggtggccgggcagagccaggcaggagccagagtcagcctggggggtgatggagctgaggccatcaccggtctgacagtggaccagtatggcatgctgtataaggtggctgtgccgcctgccaccttctcaccaactggcctcccatctgtggtgaatatgagccccttgcccccggaaaaaaaaaataatattgcatatgcagttgattaaatggcatactccatggctattaggagtgatgaaaatgggctgggtgcggtggctcatgcctgtaatcccagcactttggtaggccaaggtgggcagatcacctgaggtcgggagtttgagaccagcctaatcaacatggagctgtgtttactgagtggggctttcgcaggctggagctaagaatttccagtatgcgtaacagccacagcccaaatatctgccagtgagttgtgtaattccccagagcaggcctgggcagtgtctgggtggggcctgggagccacaggagatgcccaaagccaggcagagcccgggggcgaggggacggcaggcaggtgtggcgctgccctgggcgggcttgcacccccacacccaagtgagcggcctgctcactcctcagctgcaggagccagacgtgtggagtcccagcagaggccaacctgtgtctcttcatctccctgggaaaggtgcccccgaggtgaaagagatggcctggtggaaatcctgggtaagtgggagctggcaggagatttgggttcctgcatggtgttgggtgctggtcaccagggagtcctgagaaatgtaaagtcgcccttggctgggagtggctcagtctacatttggctgcctcctgggccaagcatggagggtgggaaggggccgagaagaaacagtcccaggcctagagtgcccacggcagggatgggacctgggccgggagacaggctgatgaagaaatctagaaatgcaagggggaagctgaggtttgagaagagtccaggggagggacccttgcaggggtggggccactcaaaggagggggtatcatggttgagccttgtgtgtaaatgtgtatggggtgcacacacgtgtgcatttggggagaatcaggcatactgctcctggcagagggaactgtgtgcagagggtcagagggcagggagcttggcttcgagggaagctgctcagcacagctcaagggtcctggtaccggaggagatggacctggggaagcaggcagggccaggtcctgaaaggccttgcctggcaggctgaggagttaggctttaccttaagagaagtgggaaggcactgaagggctttgagcatgagagtaacctgaacctgctgttggggacccatcaatgccttcacctcagggatcaatgatgttcatttgtcaagactggagagggaagaggggaagcaggaggacctggcctgctagagcctggaggaacccggggctcagggcagcccatccccagcagaactgatgggttctcgggagctttccatctatggttgagcctgaggccatcgctgtgctaaggagttgaatatccagaaggggacagaggtgacatctcccggctgccggctctgcacacccttttcctttcctcccaggcagcctcaggatgtcagggctgcactttctgttttgcagatgatgaaatgaaggctcagagacactgagtgacttgctagggtccaatggccagcaggctccagtcagagagcagttgggtctctctgcccagccccaggttctctgtgagcttttgtgggatacccaggcttgtccagcttcagggagtctctggatcatagatgtcgcaacccaagcaagtgtcctcagggtcagacatgctaggttctggacaggtgggacaaagaggaagccaggctgaggtggggcagctgtcctggcccccagggaagcagccttcttccaggacaaggggccatggaggcctgcagcttcaaccagactgctgggaacctgcctttgaggaggtggacatggcagggagagcccagtgctgggtggtttccaaagtcagttgctggccaaggcagtctggcactgggccttgcacccagtgcagcaggacaaagggctgtccatgtagggacctgccaaattgacaggatcactgtgacactcactgagtccctactctgtggccggacccttctctaagcacctcacattcaatatctcccttgaacctcacaaggagtctatgaagtagacaccagtatccttatccacagatgaggaaactgaggcacaagtaggctaggcaggtgcccgaactcactagtaagtgtgagagtctaggtgagaatctgaacagcctgactccagggccaaaaccataccctggtcgtccataccccatgtgagagctggctaggggtagcaagttcacaggtagaccccacctgcaacagctgagctgctagcgaagacccagtgtcctctaggcacaaagctgggccaggaacgcgatgggaggagatgagggagccactggagagagatctgtctgcaggcagggtccatctgcacctctctttttggtgttgccttttcctctgtgtctctcatagagacaaacccatctcccaggcctctgggcagccacgtagcaggggaaggccaaggcgtggcagctcccctgtgcctgtcacagaacaagttatattaatagatgtagtcacaggctggtctgagtcaccttttcagtgaaaatgtgcctgtctggactagcacggccctgggcaagaccctgcaggagcctgaggctgacccttccttctcagcaggaggtctggagctccaggactccacactgatagccagggctccgattcccagaacacttattttctaaaaccttagagtgggaagtgagacagaggcttctcaatgcagcaaaatcagaaccagccagggagctgcttacaaatgctgcacctgagacctaccgcacccctgcgggactgcatgctcctcagggatgcggttacacagcctggccactcgctggtgcaccacagcccccgagtgctggggcagagggaagccggcaggcactgagagctgagatgcctcccacattcccagatgacctgcgttcctgtgggtgaagcttccttcagtggaacgttccaggaacactcattgtctgggaaaggtggagtcatcagtagggcaggggaggtagatagagctcagcttctgagtcaggctggggagtcccaacagcatcacttactagctgtgtaagggagtccagctccctttctgtaaagtgaggcatcagtacttacctagcacaactgttgaggaagccatgacataagcattgcttctaaagcacctggcccaggtctggcacacacaaggggcttgaagtgctaacaggagtaatagcagagcgtgactccacaagcaagggatatcgtgtgtgtggacaccgatgagcaatatctgggaccacactggctctctctggatggaatttccataggaattatttctaacaatttctgctgtgaaacatggtgctaagaaatgactcaggaagatctgtcaccagacatttgaaattaaagcaaagagttcagaaagatgccttacctcttactcaaaggaaagatacttacagatataccatccattggaatctctgtattttcacaatctaacccagggcttcgatggatggatggatggatggatggatggatggatggatggatggatgggcgggtgcatagatggatgggtgggtggatggatggatggatgtggtagtcaaatgggtaagtgcgtaggtgggaaagtagatgggcagatgatggaggtgatggaaggaataagtgaacaggtaaatggaagacaagactggatgggactaaactctttttcatcctggaggatctctgagtctccctctaattcaatacctatctccaatatccctccattctctaccattcctccacccaaaacacacttatgtccatgttaatcatctgagaaattctgcagggcacaagtttaaagagccttcaggcaagccctgaactggaggcttggaaatcaagggctcaggcacttggttatctggtttatttcacaatctgcagagcatcgtgcgggtttttctaaacctgacgctctgagccccatgggcctgtggacttgcaaacaccctgaactatcaatatgctcagctgggcccctgccctctaagttgctgtaagtcccaactccccaggaagagggcagactgagctcaaaccattcctcagaaaggcagaaccatgctcagccttccaacctcatctgcacactctgaaggtggtgcatgcagctccaggaagcctttgcttcagtgttctttcccctcctaactttgggtgagtttgtcccttcctgctgctggtgggtgatgctggaaggagctgggtgtggctggggctgctgtctgcagtcagatggcacagacagggacaggaaaggttttgtggcttctccccacaagctctggctctggctactccaccctgttggccaaggggctgaagggcagagcactggcctgcaagggctgagcagatctccgtgcccagggaaggggctcaccctgtcagggcgggctaccagatgggctgggagcctgctctgccctccctgtccctgcctgctttgagcaggcctggttctcttgcagattgaacaggagggtgtcacagtgaagagcagctcccacttcaacccagaccctgatgcagagaccctctacaaagccatgaaggggatcggtgagtgggtgttggcagccttgccacctctgctcaagacccctccgctcacagccctggaaagcgggtgccaggggacatctggggagctggggtgtcccatgatactctgaaactgattccactacccagagaatcacacagccctctgtttctgcagtgaggtcagcacccaccctgcaagactggacaggagggtgctgctcttccctgggtaatgggggtggggaggtgagctgtgtgtctctgtgagtgacttcccatcagtctcagctttctcacttgtaaagtggccccaagaattcttggccttgtgtgtcacatgaagtgtgaagggggtggtgctttatgatgccaggcacagagctgccaggggtgtgaggtgttgggagtttgtggggctgattcaaggcccccttgccccatgtcgatggccatggagccggctcccttcccatctcctgcacttgcccagtgctgccctcagcactaccgtgagtgggcgagggctggcctgaggccagatttaaacagcttgcccagaaagccctcctgacctgagagcagagcatgtaccctgacctcaccccaggtgggactgaccccttagccggctctgcctgaggatcaggggccttaatgagaactgccgctcctgacaagcccagaaaacgttctcatgccctctgctttctgtgaagcagaaagttatctccacttcccaaatgagaaaacggaggcccagggaaatgaggctggctgcccaatgccacgcagttgctgggccaggcctcggattcaggggttggactcttagtcttgaccttcccctactgcgaccaacacaaaggagggcagggccagagatctcactcggccaagctccaaaggcccgggctgatgtccagagccacccagacctcagattccatcttgtgaggctggccttgggcacgccccaacattgtgggggtgtggggtgggaaatggggaggcagatttcctaagggtcttgtttacaccacgaaaatggtctgggggtttggaactatccaggtgtcgggtcccaactgctcagccaccaagcagctgccttcgccttcccctcctccgccctcaccagtgtgtcaccctgggggcagcagggtcacttgtgctgtaaccctgcagggaccaacgagcaggctatcatcgatgtgctcaccaagagaagcaacacgcagcggcagcagatcgccaagtccttcaaggctcagttcggcaaggcaaggggaaggctggtgggggtggggataggtgagccttggggttgggggtacagcctgggaggcagctccattctggacgactttcccctagagccagcccactggcagcatgggcacatggaacatgtttgcatgaaaacaattgttctttattgaaattcaaatgtaactggctgccctgtgttttatctggcagatctacttttaggtgtcagagcccgggccgggggctggccttccttgcttcctttcctgcctcctctctcacagcattccttctcatgcacccaacaggccccactggaggtctgtctccctgcccccaggctatctcgccctgccctctgagcccagaccaccttctcttttccatgccccaggcatgcaggcctggctttgctctgttctggggcgtgggcatgctttcctcagtcgagctgcttgcacccacacctcgtcccttctgccacctgggaattctaagagcctggagtaagcatgccaggccctttgtttctcctcccacctgcactccacccctaggacaaagcctgacatttgggggtacacagtaaacacaggattaaatatgtgcacagccatggttgcctcaagcctctagtgactcatatcattagtttggagatgtaacgaaggaagatcagctcaaatattctcttggagaacccagtatgcatttttacagtttccctctcttagtcctcacagtgatacattctttgtattcaaacatttggggaaactggcactcagagaggttttaagttgcccaaggtcccagagcctgtaatcaacaaggtggggattaaaatccaggtctgacaaagcccttgatctctctgctgctctgtagatcagctgatgtagcctggtggctcctcgtagcaacatgtgaccttagaaggaggcacatgtgagacgaagtctttaattcaggcatgcattcattcattgagtgccaagtgacaggtattttatggtgatgccatactcagagcttgcagtctagctagcaataccaatttcattttactgagagcttatgatgtgcccagcactgcactgaatgctgaattgagtcacacacaaccccctaagcaacgggatgaagcaggagcacgtttctctccgtgtaaccggtaaagatactgatgctaagagaagctaaggagctggcccaagaaacccagccagcacgtggcaaggcccacgcagaatccagcccaagcccctggacccagccaccactccgctgcctgcactcaggtgggcctggcttatgacaaatatcacctttccctgttcccgcattaggacctcactgagaccttgaagtctgagctcagtggcaagtttgagaggctcattgtggcccttatgtacccgccatacagatacgaagccaaggagctgcatgacgccatgaaggtaaccaggcagacagggcaggggagtggcaggggtgctcacatgactgggtaggggcaatgcggggaccgggaacctacagcccagagctccccttgagccactgtttggaatggccatatgggccataactgggcccagtgagcaggcagcctgctgctcagactgcacccaacacctggagtcactggtgcctgattgacacgttgagtggccgtgatgaagccaaaatcagtacttctcagaacctcacgagctcaggtgtacagtggtattggaaacccacctctacagtcccaggcacagccccttgggtttccctttacctctcactactctttgcttttgcagattaataaggatggggacccagtaactatagtcattttgtttggaaagacacttgctgcatgggcactgccaggcattttacacccacgctccctaatctatctttggcgcaggggaggcttcttattcctgtttatggatcgggatgcttaggctccaggacatggagcagcctgtctgagaccacccagctaaggagggagagctgagacagggcttccccgtcacagcacttgccctcaatgttcatcactgaagcatgtgattttctcatcacatcctcccacttcaagtggggcagggcagtgaggtccttcctgaggctcaggcatcttgagaaaagaaggtgtggacagagcagaaggtcatggcagagcactccagcaggcagaggtttctgtccacagggcttaggaaccaaggagggtgtcatcattgagatcctggcctctcggaccaagaaccagctgcgggagataatgaaggcgtatgaggaaggtaaggggtggcacagatggaggggctcaggagtggccacaagctttggcagcctggcagggaacaaggatcaagaattaacctgggccacactagaaaggaccctttggggacttttttacccacaggtgctgagcacctaccgtatgccaagatctgtgcctgatggtgacactgaacatgattcagacttgatctgtaagctcaccagctcctcttacaggggagagaggcctgtgaccaactaaaatctctgcccttgaggactgtggtagtagggggtgtggaccccaggctagcagaggccagtcagtcctccacatcatgtacctagtggggagttttcctggaggctttggctttgccaagccttgagatgaaatggagcttggttggcagcccctagcctggctctctgacctggtccatcttgtgctttgagcttggttgggtacgcatgtcgcttctagttgtgaagcaccacccaggcgacagccacttggacacccgggcattgcatccatgccctgtgccaaggactttctttcctagaaggctttaataaggagaagtatggggaacagggctggaaggaggaaagcaggccccgggtaggctgtgggcctctgcttgtgcctcatggtcctgtttccctgcagactatgggtccagcctggaggaggacatccaagcagacacaagtggctacctggagaggatcctggtgtgcctcctgcaggtgtcacagcctaggctcttgggagtgccttggtttgggagtcccaacagctccaccccagggagcagcccttgaatagcgccacaagagtcagggtaggggcatgggatagcccagcagccagggctcattgggtgtgtctcagcatggttagagggtcccaactgcagagcccccacacctgtccttactcagccatgtgagagcatcctggaagcgggaggagagcaggtccttcgtgcaggcctcatgccaggcactttgcttaccttagctcactgaatccgccaagccttatgaggcagtccttaccacccccattgtacaaatgaggaaaccaagggctgaagagaataactggcttgtcgaagtttccacagccaaagagcagcagagccatgcctgccctccaagcccaggatcccccctgtgcccttaatgctctggtcagctggcctgccttacagagccacctcctctgttcctagggcagcagggatgatgtgagcagctttgtggacccaggactggccctccaagacgcacaggtgaggctgcgcccagccggccatgtggccccaccccctgccatctggactccggctcctctgcccacgggggctttctctgacactgggctgggacccacccagctcagctccctataggcctttgtcctgtggtgtctggggaggagagtgagggtgttgggagactcgggaggaaggagtgtgacttgggggtgggggagcactaaagctctgtcctggcaggaacagcccatgaacccgggggcgctaggccccagtgctggacacaggtgtccgggtctctgtaggtctgcctgctggcagagggaagtctggggaccaggcagttcctagagcagcttgtggcccaggatagagaaaatattctaagccagagctgctagagaaaggggagctccctgtcagagacgaccaagcaggggagcatgctggcctggcagagtggacagggccaggccatggccacagctctgggactctggggctcagtccctcacctccctggtctccctcactggcttattgtgggtgtcccaatgctaggatctgtatgcggcaggcgagaagattcgtgggactgatgagatgaaattcatcaccatcctgtgcacgcgcagtgccactcacctgctgagaggtaccagggagggaggggctggggccggggccacagggggtgtcctggccatgagcctctccctcgtgcttctgccttgtcaagtctagagttagggagagagccagggagcccaggactgtttccccagccaccagtgggaggtcagggcggcaaattgatgtgcgatctctgatccgagacactgaggggcatcacgaggaggtctgaccatcccctgagcagagccctctccacagtgtttgaagagtatgagaaaattgccaacaagagcattgaggacagcatcaagagtgagacccatggctcactggaggaggccatgctcactgtgggtaagagctcagacttgcacgtttttcaggccacagggctcaccgtggggcagcaccaaagaacaaagggcctagggatgcgaccacaagagaaagaatccctgtgtcaccttcacgggatgtccccccgactcacactctgcctgtctccctcacccagggactgctccacctctagagtcccagtgtgtgctgccaaagattgttctctgtgctgcccacgtggtgcccagtgctgtgtgggtgtgtctgcatgagtgtgtgtgtgcgtgagagtgtgtgtgcctgagggtgtgtgtgcatgactgtgggtggaatgtgagtgtgtgtgtgtgagacagacagtgtgtgtgtgtgcgcacacaaatgcatacgccagtgattatgccagccccaaccctgtgtgtactcatggcagccatgcagggagcactctggctgtggttgtgaagccctggccagcacaaagtcatctttctggacatgaaccaggggcctggcccctgccttcattgccagttgaagaaacagtgatgtgtggcttgagtccaaactgagtgacggatggtctgatgctgagaaacactggggatcttccccacagcaggaagtcagggccactcaggaggacccactccagagctctcatgggttccagggctgagatcacaatgggaagagtcactgcagagtaaagagctgaggcccagggcagagggacgtctcttctcccacttacacacagagcccaggtccggactcctggcctgcagctctcacctccacaccaggctgcctccgtgcaaagccagcagccagcaggctccctgctgtttcctagcctctctgggtggacagggccatctgagacaccccagctggccttggatgctgtgatacaatccggtctatgtcaggacatctaatcacacccctgctccaatctcagcttccacccctggatctggcctgaacccaccaagaatgaagtctgccagcagggaatagtgaagccatgcagtgctccgtcatgctgggccttcctattcacttcaccttgaagcctcgcatcagtctcacttcccagatgagtcagggaggttgagtaatgaagccatactgcaccatcaaggcaggaagtgaacacatgcctacctcactcaaagcccatgctccttctgcagccctaagtgaaaatgccaaccttccccacccagatgccaagtctctgagcagtacccatgggagcaagcatgggcccagtctctggaccagacgcccccaggtgccttagtcctgtggggccaaactccacttgtcacatgggaattcaaaatgcagggttcctgctgataagtgtgagagagagggcactctgaggccagcagccaccatcccatggtgcttctgtggagctgagaggctggatttttggtggaggtgtctctgggttgagagcccagggcctgtcctgagtctgagctgcccttggatgggcttgagctggtgtcttcagacgagccccacagtctggtgcatttcacatcttacccttttgcctgcctgcttgggcctttggagctgtgcccagtgccccgggctaccttccctgtcccacgccacctgacacaaagcctctcacattgggaaaggcacggaacaaagaaatatgccaagccttgcacaacactgactcttaagacctaaggcaagacataaagttgtaggcagtgccacctaccagctccagacattaacacagctttcttgtttgccagtgaaatgcacccaaaacctccacagctactttgcagagagactctactatgccatgaaggtaactgtcctgtcttcttcttcctgacgctcaccctacatagcaccaagtgcaaagccaaggagctcaaagccaccacgatcctccacacgggggagttatcttacccaaacctgtcgtggatcagaaaggttttagttctcggaggtgaaattgagtctgggaaagggacgctgcatctccagaggtgaataattccctgaaactaaaaccattgcccgttttctctgattgatggttgctgatatcccctgaagttagttccacacccgaaacccaagccctctggccacttctgcccaggaaatgagagagggcatgcgattcccttggccatgtggccccagctgacatgagactggtcagggatgaaggtgagcaggaaggccctgcctgtgaaattcctggctgagctgattgctgccattgctctagtaggaagtcttgttcctggagcagtgagtattttgtgtctagaatctgatgtggcaaaccaaacatactgcagtttggagcacttggcatcataaaggaagagttctgggcagtgggtgagaaggaattaagggagtggacaccctaagccaccaaagcttccctcctaatgcttccctggctgaagcacaggctccttcccacatctccctccctctaaaagccccagaacccaaccacacagatccgtccatcactcagagatggacaggaaaggtgaggcaggattgttgatggctgctgtcttgcccagggagcagggacgcgtgatgggaccctgataagaaacatcgtttcaaggagcgagattgacttaaatcttatcaaatgtcacttcaagaagatgtacggcaagaccctcagcagcatgatcatggtaagcaggcattcccaatgctgaggccagcctgaaacccagacattcagggaaacctggaggctgtggccaacactacgtgagcccctcccttcccagtgggcaccatgtgcttgcattcatgaccatgtggtgtgtgcagggaacagcagaggtcagtgtggctggatcccaaggggaatggggggcagaggggagatgcagagaccagggcacagaggctcccctgtgtcccactcagaaagttggtttcacatttaagttatggttgctccttggaaaagacaccaaatccttgcagaagaagccacctctgaaaagtcaatgagatgaactagtccggtaggaatcgggcccaccgctcaaatccagatttaagtagtcctggcggccaacttctaaggagataagtcagatgagcgccaatagactatctaaccagattccaattagcaaaagttctggagccttcaaaacacagactgattatcacgctgcgataattgggagaaacagctcttctgggggtgtctgcaaattgaggtcttgatgatttcattagcagaagtcacattaggacaaatgtatccccaagttttctttggctactaagtcaagtctctagctcttctgcaaatgtcgttgttaagtgcacttttcaagaaacacatagctgacaataggtggaaaagacatttctgtttccagatgtttcaagatggcaacatcttgaaacaggtgggcaggggcaagagaggattggaattattcttggtttcacttgaggctccccagccaatcttgtcgggagacaggagggcaaggcacacaccagcctggactgtgctgtcacctgcagacagtctgagctgattgtcattaacccttttaaccacacatggtaacttacggcatcagagagatttctacagatacatgaagccaccctcttcaaattttatctaatgttgttacttaagaaaattgagttagaatcatgaatacattgaccaaacgtttctttttagtgtagaccacagatgtcattaaagcaaaaatggttttcaacactaatatgagttaaaaactcctgcattgaaattaagaggcaaatgtataaacactccaagtataactcatgtatttgaaaaagtaaacaaaattaatgcttttctttctaaaaactattcgaaaaattgtcctcaaaataataaaaatcaccaggcgtagtggcccacacccgtaatcccagtgctttgggaggccaacgcgggaggatcgcttgagcccaggagtccaaggctgccgtgagctaggactgcatcactgcactccagcctgggtgacagagtgagatcgtgtctagaaaggaaaaagttaaaaaaaatttcattgtagtttgaaacccgtaatgagatttcaggctcaaaacaggcaaattttactaaatggtgaaaagtagacaataaccatgagacctaaactggtccagagtgtggaaagtgggtctagccccagtctaccccttactcaccatgccgttgtgaatgaattcactcccctctcttggccccgctgtcctcaactgcatgaagaagaatctgggtgatctgacctggcccatttcccagctctgtatgcagaccccggactagccagtcccatcaggacctaccactatctaagaaacagggctcctcagtcatcggaccacaaggtcagtctcatcaggagacaaacactgtggacccgatgtgagccagatgcagggcagaccagctcgccttcctcctgctgtaccctcaccacgtctcagcaagatgcacagcagcacagcattgatctcatttcatagatgagtcccacagaggtgaaggggcttgcctcggccacaccgtcagggtgcgatggtccaggctccctccacccccggccctgcccccaggtgtgtgctgatgcctcactctcagccttgattcccaagctgccacagcaggtgttgaataatgatgcatcctgttgtgtaaatgaatggctgggcaccctggctcccgaatagaagaaccctgggacagctgaccccttccttgtttaggagtggaactgtctctgattcattttccacatcaatcctgcatgtagttggtaagagaatcaaaaggaaatgtaaaggaatagcctgaaattaaaaacaaggaaagaggggtgatggcacaacccctgcggctaggaaccctggagggccgggccaggtgcaggccaggggcacacctcttagtcataataacacagccgccactgccgagccaggcacaagcaaaccccttctcacgcttatgcgcctcctgcccacaggaagacaccagcggtgactacaagaacgccctgctgagcctggtgggcagcgacccctgaggcacagaagaacaagagcaaagaccatgaagccagagtctccaggactcctcactcaacctcggccatggacgcaggttgggtgtgaggggggtcccagcctttcggtcttctatttccctatttccagtgctttccagccgggtttctgacccagagggtggaaccggcctggactcctcttcccaacttcctccaggtcatttcccagtgtgagcacaatgccaaccttagtgtttctccagccagacagatgcctcagcatgaagggcttggggacttgtggatcattccttcctccctgcaggagcttcccaagctggtcacagagtctcctgggcacaggttatacagaccccagccccattcccatctactgaaacagggtctccacaagaggggccagggaatatgggtttttaacaagcgtcttacaaaacacttctctatcatgcagccggagagctggctgggagcccttttgttttagaacacacatccttcagcagctgagaaacgaacacgaatccatcccaaccgagatgccattaacattcatctaaaaatgttaggctctaaatggacgaaaaattctctcgccatcttaataacaaaataaactacaaattcctgacccaaggacactgtgttataagaggcgtgggctcccctggtggctgaccaggtcagctgccctggccttgcacccctctgcatgcagcacagaagggtgtgaccatgccctcagcaccactcttgtccccactgaacggcaactgagactgggtacctggagattctgaagtgcctttgctgtggttttcaaaataataaagatttgtattcaactcaaagtatctttggatgtttagcagggaccagtgtaggaccaatttaatttgtcagaaacagagctttggggagccacgaagcctgagcgcctcgtgggcatctcccagtgggaacactggatgggctgtacctgagcacctcatgggcatctcccagtgggaacactggatgggctgcagccaccgctgccctggggacaactcttgcaaatgagggtagattctattcacctcctgatgtgtaggctacatccttgtatctcagggttagagagggatttaaagtcagctggtgctgttccaacctgtggcctgactacccccttggcatccacccaggggtggtccttggtgtgcttggggtgcacttgggtactcagggtgtactggcgatactcagggtgcagttgagtactccgggtgcacttggctgcctccaaagatgggactcactgcgtcctttgacagcccaatctttttccaatggatgtgaccagcaaagttcttgctttacctgaaccaaaatcagccgcatcaagcccacacctctgccatctagggccacaacacttattccctcccagtaacaacattttggatatctgaagaaggcccacaaattctgcgatgacctctgtcaaagcccagtgtccccagtcccttcagtggtccctcctggagcctgtttggggccatcacccctgaacatgctccagtttgcaaacttcccctcaagtggccctgaggggtaagcgtgtgcccaggaaccagcctgatcagggagatgggaatagcgtgggctctgaattcacttggacgggaggcagattctggctctgccctgcaccagctccatgactttgactgtgttaggctattcttgtgttgccataaagcaatacctgagtctgggtaatttatttaaaaagggggtttaattggctcacagtcctgcaggctatataggaagcatggtgccggcatctgctcagcttctggggaggcctctggagggaccttacagtcatggcagaaggtgaagggggagccaacatcacgtagcgagagtgggagcaagagaggtggggggaggtgccacacacttttaaacagccagatcctgttagagctcaagatggtgaggacagcatcaggcgatgagggatccgccccctgacctaaacacctcccaccaggccccacctccaacactggggatcacatttcaacatgaaatttggaggggatatccaaactatatcagtgactgagtcacttactctctgagcctcagtttcctcacatttctatacagggtgggctcccagttacaactgctgcctttcgaaccaccccagagccagtagcataaaatcctcatgtataatgttcacagattctgtgggtcagcagttctggagggcacagcaaggtgcttgtctctgacccaacaagtaaggggactcagtctcagttgggaagacctgaaggttgggtgactctagggcagaggggtgcaaccatctggatgcctcttcactcacatgttgggcccctggtgagatggctggaaggccaggctcaactgggactgtcccctgcactcctacacgtagcttctccagcatggtggcctcagggtagcaagtggtagggctccaccgtctcccagtggacaagaaggacaccacattgccttctgtgagttagcgtcaggagtcacatggcatcacttccccggtgccctatcagttgaagacaccacaagccaccccagcttcaaggaaaggggacacagacccaatctgtcaatgagaagagtgtcaacgaatctggggactgtttttaaatccaccacaagtggtgctcagaatatttaacaactggtgcagcacaacccactcacctgaatggctgctgtctgcaggggtggagcagagctcgagtagcggcccctgcagggccaggcctcaacccttagtgctggatggcagggtgtctgtggggccccaggggaggctcctgggtgttgggggtgcagcagctattcaccaacatgtcttagtcttttcagactgacatacaaaataccataaataggtggcttaaataacagacacttattttgcacagttctggaggctgggaagtctaagatcaattcagttcctggggagggcctcttcctggcttgcggacggctgcctttttgacacgtcctcccatgacctttcctctgtgcttacacgtgttcacggggggaagagctctctctctctctcctgctcttttcataagatcactataccatcatgagggccccgccctcataacctcatctaaccctaattagcttccaaaggctcatctccaaacaccagcaaactgggggtaagggcttcaacaatacacaatcagactgtaacacagcaaggcaggggcccttcgggagtttaacaaccttttagtagttgtatcagtgtgcgtctcttggatcccagccctgggtgagaattcttattcctttctttcagttcaagtcctgctctgtgtgcagacttgctttcagttctgagccattgcctagctgctttctgccaaaactctttagaaaggatttagaggggccaggcgtggtggctcagtctgtaatcccagcactttgggagaacgaggtgggcagatcacgaggtcaggagatcgaggccatcctggctaacacggtgaaaccctgtctctactaaaaaatacaaaaaaattagctgggcatggtggcgggcccctgcagtcccagcttactcaggaggctgagccaggagaatggcgtgaacccgggaggcagagattgcagtgagcagagatagtgccactgcactccagcctgggtgatagagcgagactctgtcaaaaaaaaaaaagaaaaagaaaaaagaaagaaaggaaggaaggaaggacttagaggatctctctgccctgcaagctcccctgaccactggttcgatgggttcttttgcagcccaccccaaaacaggcctcatgtggccaaacaggagccttgagaagagctgcagccaaggaaatttggtcaagtccaagtacatgcccagcaaggggatctgcttaagcagagtcatgaagttgatcatctcccctgatggggcagaatggacatcacccccactgcctccctgccagcagagaaatgtgggacaggcctggaagcaagaggtctcctcagattagaggggaagctctctctgcctggggtcagagctggagcagcatgggtgtaaggggtcacggccccatgtgctgactccctccaggtgacccccatggcacctggggaaggaagcaaaggggccctggccaggacaccagcagcatccacagcacctgctaatcatttttgctggagtaaccttttgggcacttctggtaaagcagacacgctccacaggtgcttttgcaattgctctttggaatttgttaaaaatacacctatgtttttaaagataatttggagtctgcctagtttaatttcagcataggggaaaaataagggaatagtgacaaagtttctttacttgagcaaacttgagtcaggctcctgaaccttctaggctcatctgtgtactttcttgtaaaatccaatttgagcaagaatcccactaagtcaattcagcaagaactccccttgttcctatctgaccactcccaatatccgatcagggtcctcatcctccaccttcccaggtgatgtctggtcaccctggcctttcttcagcaggtctcctgttaggtcagtttagccagcatcaccctcacccctggcatttcctcttggtaattttccatctttcaactcctacctgctccatggctccaagtctcaacttctcatgctgtttttagaatcagcctgactgtatattgaggtctcttttcgcttattgcaatagtcctgaataaaatctggttttactactttatcgtctagctctggtttttctttgccataggtattccctacctgtagccttgccatagctctatcatcgttgctttttaattccctccaagagatgatatctacatatactccctctctatcctcagatcaatgttttgcatttcctaggagctgaattccttttcttccattgcagcactggctgggagagaaggcacaacatggtccagcatactgagccccaagtttgtcctgcagcatgatttgagacacagtgttcgtgccacacagaattctgtgagccgtccaatagcctttcatacatttgttttctgcttaaactacagagtagatgctcttgtcagcacctaagaacactctctattacacagaactacaccctaatgacattttatctgtttacgtgtcctctcagaaaagctgtgagccccttgaaggcaggaactttatttgtttttaaacattcagggcctagtagatagcaggctttcaacaaatatttttgaataacaacaaacaagagtatggactttgggaacaggagagcctagtagccagcaagcctgagccaatccttgatggcctccaattctgagaagactctctgggcccccttaggctccctgtggaagaaagcttccccagtcaatcctaataaaaatacttctgagacagatctaacaggacaaagtggagtctctccactctttcagtagctccttcaccccaggtgctgtttggggttctgacactgccatggcatggccagcaggatggcccctagggctcctggggctgctctataagagcttcccacccctgacctgcagtccatgagggcaaggccagatccgggcacacgcccatccgtgttgttctcatgctctcagggggtagagctagtgtgttggacttggcatgtttagggtcacctccctgagggttgacaacctgagcaaaatcagcattcccttggcaaggaataaagggggaatggatttgtggtcagcaacccacatcgttggtcagcaacccaccgccaagcattctgcctgcaacagggtggggctggccaggggaggctcctcagggaaggtgaaagctgtgcagagttttgcaggatgactcagtgcttatcaggtagacagataaggaagaacattccagggagagggaggaatgctaacaacagcaggggatctggtctgtactagacatgccaaaggaatggtgtgtccatatcaacagaggagggagagacagaagagaaagagcttgtcagggcctgagtcagagcgggctcatgctgtggggctaagaagctcaaacgatttccagagacagtggggaagctttacagggacaggcaggggaggatcttaacccggctttcgtaagcctctggcttgagtatggaaggtgagtctgggacagggagcccagcgccgaagtgttgcaacagtatagggagacatacagaccaattccctcccacctaacagctctgtgctttggggtcctgggttagtttcctgggagaaggctggccttggctacctctgtccttgaccaaggacatcgttttaaatatttgtgatgtgtcctaggccactgcatctctgtccctgtagtgaagagaagatactgattcctaagctcctactctgagaacacaaatatctgcaatacttcggtaagccctaggcctgagtgtgaggttgcaggcacttccatggccccatgcaggtgtccaagttccctcgtggtatttggccaaggggggccctgtgtgatgccctagcgcggtgactacccgtgttcctggcccatgggcatcttccacggaattctgggcttagcctggggattcatgcgggcgcatctctgtgatctgctctggagcaggatgtacatcaggtctctcagacctgagtccctggtgcctggcgctcagccttgactgaagtgctcggcccaccctgctgggccagccagctcctgctcagggccacagccctgtaaccacggcttcctccccaggactcaggaattctcccactccggaatgccttgctgctggggtgaccaggtcttcacttgtgaaacaggagtcggccacctcagccctgcgcctggcctggtggaacatgggtcaccgccccaacctggggcagccgccccatcccaacgcagttgctgccgctctccatgcctccctgtgcccagctaaccgggggacttgtcccctgggaaaacctgggtacccaggctgcctttggtttcagcccctactcctcttcccgggctgcctttgctccccggacggcccctttccccgggctgtgttcacatcggctgggaagggtcccttgcagacagatcttggacgaggtcgcgtcccccctcgtgaccagcaaactcctaaaagccgcccttgccccagagcccctgtagcctccaaccggcagtcaggaggcagcgccgtctcagcgccgcttagtggcgccaggcgtgcctggaaatccgctttcgcagcgccccctcgtagccgcctccgcccgcagaaaggcgttccctggacagagaagcgggcgcgcgggggcgggcgcgcggggccttgccggagaacctgactctccgcagcagcagtggaagccagagtgacgcgttgtgttgaacaccagttttctggagcgctgtgtgttctcatagctgagcagtctgtttctccaatcaggtttcaaagccacttcaactgcactggcccctgtgggtcactgctgcaccgccctggcccatgtgggtccctgaggagcgacctgccggggccacctggctggacgaaaaagacacaccttggacttaagccgtgagaaaaaaaaaacttcatcagtaagaaacaagtcaatagacaagtaaaagactaggagaaaatatgcataaaacataaaaaagtgacttgattcctgattctggagtatttaagaattcctataactcaacaaaaagttcagttttttaaaatgagcaaaaggcttgggtaaactattcacaaaggaacatagacaaatgccagtacacacatgagaagcgcatacacatccacaaacttcaaacaagcccacctcatgtatttctagtgagtaaggaaaagaacgcaaacacttttgaaaattgtttggttgtttcttgtaaatttaaacaaataccctattatattatccagcgagtccatccttaggtttttatccaaggataaagaggtgaaaactcatatctaacaaatagacttctgaaaagatgaaaatagaagctttattcataaaagacaaaaactagaaataacccaaatattcattcacaggagaatgaataaacagactaggttgaatccatacaatggaatggtagcagacaataaaaagaaaatgaactattgatgccccctactgcacagcagaagctctgaatcgtgttcctgaatgaaagaagtcaggtatgaaagaataaacattgtatgattccatttatatgaaaatgaatctgtgatttaaaaatcagactagtattaggttggtgcaaaagtaattgcggtttttgccttttttttttttttttttaaatagttgctttggggtttatggatggagtggcatggtagaggttagctgaagggggcatgaaataactttttgggggtgctagagtgttgtaaatcttacagtgggggagggacaggagtgcaggcatttgacaaaacacattgaattgtgaaatttaagatttttgaatttctttgtatgtaaattacctgccaataaaaacatgacgaatagagcagttatgagcatttgtgtgtagctttttgtgcaaacttaaattataatttctctgataaaagcccaggaatgtgattgttgagtaatatggtaagtgcatgttttttgagaaactgtcaatctatttttgggagtggctgtgtgtatcatgttatattcccacaagcaagggatgagaaatttggtttctctgcatccttgctagcatttggttttatcattatatttttatttcaactgctcaaataagtgtgcagtgatttctcatgatctcaatttgcatttccccaaaggctaatgatgttaaatatatttccacatgctgatttgactcggccatgaaatgtctcttcatgtctattgcccaatttcttattagattttttttttactgttgagttttgagagctctttatgcattgtaaatgtgagtcctttgtcagatacgcgtttgcaaatattttctcccctccatagcttgtcctttcatcatcttaacagaatattttgcagaggcaaagtttttaattttgatgaagtccaatttatcaattctttctttaatgaatcgtacttgggtgccatgcctatgaactcatcctcaactcctaggtccagatgattttctcctgtgtcttcctatcatagccagaaactagaaaagaaccaaaatgtccctcactaagtgaatgcttaaactaagtgacacatctatgccaatattcagcaataaaaagaaacaaattattcatgcaaataactaaatggatggatctcaagagcattaggctaagtgaaaaaaaccaatctcaaaaagtcacatactgtacgatttcacttgtataacattcttccaggggcaaaattataaacagtgaaaacagattagtggttggcaggtgttagaggcggtggtggggaagtgtgactacaaagaggtagcaggagagatcttgggatgatgggatagttttgtgtcttggtggttacaggaatctacacatgtgatacaatgtaatagaagaacacacattgtgctaatgtcagtttccttgttttgatattgttctgtagaatgtaaaatgtaaacagtggagaaactgggtgaaggatattgggaccccttcacaaattcttgtcaatctacgattatttgaaaatttaaaagtctaaaggctctgggcagggcctctctctctctctctctctttctctctctctctctctctctctctgtgtgtgtgtgtgtgtgtgtgtgcacgtaggttttctattttacatttcaagcagatggccaggcccttggtattgcacaggtgcttgcagtgtgtattagccagggttatccagagaaatagaaccaacaggctatatacaggtatatgcaagaggagatttattataggaattggctcatgtggttatggagactgagaagtcccacggtttgctatctgcaagctagagaaacaagaatgtcaatggtgtgactcagtctgaggccgaaggcccaagaagtacagggctggggggtggggcaatggtgaaagtccaaatgctatgacctgaaagttagtgtcccctaaagattcatatattgaaatcttaacccccaagggatggtatgagaaagtgcaggtatggggaggtgattaggtcaccagggtggagcctcatggatggaattagtgcctttataaaagaggtcccagagggctgcctcagcccttccaccatgggaggacacagaagacattattggccaaaagatgctaacaatgaaccagagagctgactctcaccagaaactcaatctgccttgatatggacttcccagcctccagaactgtttaaaataaattcctgttgtttaaaaattatacagtttgcagtagtttctttagagcagcccaaatggactaagacacagtgggaacagtggcctgaagtgaaactctcttccatcttgtgttaagatggaaactcctgagaggtgatgctcagtgtctctgaatgagggagtgggcagggaggtagagaaggcagaggtcagggagttagagatgtagcttgcacgtcactggacccccaaggggtgtctagatggtgccaggcccagggacccagcctcaccatggccctggactgaaggacccatgcaggctggacagtgggtgattggggaaaccaagaggactgctgaccagggggcttctggacacaagactttgacccaaccctggagaaggaggagcccttcagggttatgtgaaaaatctctctaactatcaagaattccattttgaaattatgaatctttgagatgaaccacaaaccttgcaaaaatttcacagaccacttgagaatgtggccccagcttggggtgttcacttcctctatcagctggagaatttccatggaaagtataggaaagcctgccttagagtccatatgggagatcccagcctgagcctggctacaggctatgcagaggcaggacccaagaggagaccagaaggacaggactgtagtgactataggttgctggctcatgatcacccgggcagccaggcctcagcaggaccagacattggaaagcccacaggacccctgcttggggtctccttcaggtttccctgctccctgggccatgcggcctcagctctgctgtcttctccccacctctgcctctctgtgtacttggctgctagtagccctgcagtctgcggttgctcatcctctgttcagatgaccccatggccactttgctggggagagattctgatcccatagtctgggtcaagctgtctatgcctgatctgaccaccaaggtcataccatacaatcagggctgctgctggacccagcacggggtatggagaagtttgagggtgtggctgtgggcagagcaggtgtccccaaagttgtctccagcaagtggaggagcctgttcacctgtctccccatgagtggcccctgtcaccttgcttcctttactcctgctccagatgcttccacgaagctgagccacatgggaaagcaagcatccctctgccaccctcactgccttggcaccgccccttccatcagatcccactcctgcctgctgcctgcagcctacctggtgagctcatgccagctcagagaccagggctgggcctgggcagagggagtcccatgccttatgtgcaggaagcatgggtctgggctgttaacagcaaagccattgtatttgtccactaggcagccagaacaaagtcccacgcactgagtgacaaaaaaacagacattttttttttcctcagaattctgcaggctgcaagtccaaggtcaaggtgtggggagggttgttttcctctgaatctcatggagccaggttttgctgatggccgccttcctcctgtgtcctcccatgcttttccctctgtgcatgtctgtttcttaaactgttcctataaggacaacagtcgtactggatcagggcccaccctaatgactttgtttaatttaacctttacaaatcctctccaaacacagtacagctgcattctgaggaatctgggttaggactttagtacataaatttggggaggacacaattcagtgcatgccaagctttatcagcagcactaccctctctaagtggtaatttctaaaagacaatggggctctggggaaagactccaacatgttttgaagccaaaaggccccagttccagctggactgcatcgttatgggtagtttgggggccacaggcctcctggcttctgcagagaccacagctgtccagagtgaatgagattcaatatgtcccccctgcccagcacacccggggactcctctatggctgctcctgcaggatgagctccaggcgtctgatgccatgctgggtcaggaccctgtggctcaggccagcctgcaataccggaggggaccttggaatctcgtcatttcctctgacgagtgaggagccagggtagaccatgtgggtgccctcattgttctggggcagtgaccccctgctcatgatccctgtggaggttctgggctccagggacatccaggccagaatgcccagcagttcagctcatgagtccaaaggtaatctgggagtctcaaactcacggatacaattattgcaaccagaaatcctggtcctttcttccctatatccctgcttctgtgggtgggtgggggcatcccaggaggaaaactcttgctcagagagcagatggccctggaggtgtttgtttgacagctgggactccatgaagggaagggtggccccagctcaggctgtctcagaaatgggaaggaacaaagtctgcagaagctctaccctggggcccaggggacagcaggcacaggggctgagaggcatctcccatttaccctccccccagggtcttcctgccttggtggcctcagacatcagtggcgcaggggcctccctgaggactggcatgaagatgagaagggggtggtgacagtccattgttccaggagacacaagtgttacatttgtttactaggccgatgttacaaactgatttttaaaacaatgcttgcagagtcatggaacaaataccacggagcagcacctagcacagaggaaggccccctgccctgggcatctgtgggaaaccagggccccaagtctgcggtgagctggtgcagaaactctgagctgaggagctaacattatacccatctgcaactgagagaacctgccaggctccaacaaagccaaacgggaaactctccccgggagacaccgtcctcatccagggaaaccaggattctcatggaacgtcattttctactgaagaggagcgcagaggaaaaactcccaggtatcccaaagagaggcagcaaatacaagaaacaaggagattcaagtcccagaaagtaaagagaatggagtgatctaaaaggaatatttaaatgagggagtgtgaaatgtttaaacaagataaaggaataaaattatatgacaagaacagctaattaatacaaatgcagttttaaaaggaccaaagttctaaaattcatcaatgagaaatgaaacacaacagagagtttaagacaaaaggtggaataactccaaagacagacctgagcagcatctgccctgcagcactgctgaccgagacagaaaccagaaacaggatattgtgcacaaggagcacatgagaagtgtctagcaggacaggtcactccagcatcctccgctcaccccagcatcctcagctcactccactatcctcagcccactccagcatcctccgctcactccaccatcctcagctcactccaccatcctcagcccactccaccatcctcagctcactccagcatcctcagcccactccaccatcctcagctcactccaacatcctcagctcaccccgttggggaggcaaccattgaactccctctgatttttctcattccctctggatgctgatgcttagggaatgcagaccccagcccaccaacttctaagcaaagccagcaatgagaggagctccctgcttgctggaagggaaggggagtccatcctccctgcccagcctagggacttccgagatgcgctggataggtctttcccccttgatctttagcacaacccagagggtggtgatttccccctttggcatctggttggacaatggatgggcttcgctgagggctggcagccttgttgagcctgttctttcagagagtgggagtgagtgtccaaagggtcctctcagccgcctcctgctacatgcccctgcccactctcctagggttctgctggggaccccagtgggggcaaagctcaagcctgggaaggatggggaaggtctctgggcacaggtggagaatgtgaaataacatgaattcagcacttgccatgtgccaagcaggatgctgagcacatccaaacccccaggacctaaccatgcttacacgctaggagggaaggcacagagcattccagcctgtgcacagggtcaggactggatgggcccctgggtcctggctgagccgtgctgtccttccattctccagtgctcccggcctccagcactgggtggcaggtgctggcaggctgccccacacatcggcctgccccaggctgcccttgcaccagaagttgctgcttacgggactctaggggactctcctcaaactactcaggaccccagcagctcactggaccctctagctgcatggtggccccagagggcttttgtggtctgacctcagtaaatgcaggtgatgggaagatggtgtggggaagctgtgggtctggcctgaattgtgttccctctgctctgccttgtttgctgggtttctgaggtggaggagggatgagggagaggagaggggaatggggtgaagaggcaaagaattttccagtagagggagaccagctgtgagagctgtgtgtctgtcttcctgcatgctcagcatggagtgtgtgagtgcacatgtgtgtgcatatgtgtgtgtgcggggtgtatgtggtgtgtgtgcatgtgtgtgcttgtgtgtgcatgtggtgtgtgtgtgcatatgtgcatatgtgtgtctgtgtgatgtgcatatgtgtgtctgtgtgattgtgtgtgtgtgtgtgtggtggtgcatgtgtgtggtgtgtgtgtgcatgtgtgtgtggtgagtgcaagtgtctttgggggtgctgggattgtggggatgcagcgagttgccatcctgactctcctttgtgggcccctcttctccacaggcctcagagtgctttactacatttatctcacctccctatatctagcaaggggccccaaagcagaagagttgaggtgggaggtggggaatgggtgtcacccgccctggctgtttctctggcttctcagggccacgtgcttcctctccagcccgagaacacggctgtccttcatcacctactgcatggaggacagcatcgtcctgcagctcacactcacactaggcaggggagtgctgctttgagcccccaagggaggcctgaggggctgggccagagggagctccagggagctgaggggctccctgagaccttggttgggagcctgacagcacacatggcaggctggtcaggacaccactcagtgcccatcctgatctcaatgactgtttccctgaacgctccggcccctggctgcactgctactgcaggtccttgtgctccgaaagttctcggcctccctgatcttctccctcccctgccctccctctgccctgcctccttccctgggaggtggctgtgaggattccttgggtgcaggggctggcggggcaagtgtgtgtatcctgtgaacacctgcctatgctggcagctgctctctgtgtgtccctctccgccctggccggtgggggagggagacagggtcaaagccacggggagtgctgaggctttagcgcagggaagttggtgggcccagacaggggagccactgggtggagtcctgagttccaggccaggctgggaagctggagggaggcaggaggaacaagtgtccatggtgctggaggtggcacagccctagggcactgcagagctgataggcggggaggtgaggacacttccaatgcagatgcctggaactgagcccagagggaacgaagcacagaggagaggtgaggacactgaggacgggagggggcctgggcccctcttgcagctttgacggggagcagggaggaggcttcccctctgtgggagacgggaggcttgggtgtgtgcctcctgtgctgtgggtttgggagagagagactgaagtgggcatgagggggaagaaagcaagtctatgggggaggactgtggtgggagatgcagagaggcagtgggggcagggcccttcaaaggctgagtgaggaagaatgggtggctgcctcccctccaacctccctgttcctgggggtcctcccccaaactgaattcccagaggctgctgtgaggaagcggctgtgtctcaaccaatgtctgtgtgtccgctgggccaaatcttcacctggtgtcactgagggtccaagaggaggcggctggaccttgagtactcaagggccctctccccaccatgcctgaagcaaggagcccaggaaaggtctcacttggcccctgcacagggtgggcttagcgtgatgttcccgccctgaaatctgtggtgctctctcaggccccaggggtacaggctgtgcactcagccaggccctccctgatgtcaggtgtaagtggagccacaaggctgcctgaagataccatgtctcatgcctcagctgagcacccaggcctcgatgccttcttcagggctgctgaacactcggggtctctcctccctgtccttctgtgtgcctgtggcaggcaggacacccacagcggcagggccaggacacgggtgcggcaggcgagccacttaggaccctgctcagggcaatccatcacagaagccctgttttagctgcgattccagagacctacaggtgattccccatctcctgctcttcctgatccaacaaggaccaccgggcacccactctgaggctcagggagtgtgtccttccaccactgtggctcctgccctgagacaaacaccacaggggacacagggcaggtggggctggccccaggagccagctggggttcccacaggtctgcagctgccaagggcattggcctccaccccgcctcctggccctggccctgtgcattccaatccctgctgacgcctggggtgcccctggtctatgcacccaaggaaagctttctctgaaccctgcttcttgtctttctgcagtgtcacaccttcaaggcgggctgtgggtgaagctggcctgccgacatgctttctgaggctttcaaggattttcaaaaacgggagcccacagttaaaagcccaactttgacaggcacagtggctcatgcctgtaatcccagaacattgggaggctgaggtggggagatcgctttagcccaggagttcaaaaccagcctgggcaacataatgaggccctgtctctacgaaaatttttaaaatttagctgcagtgagccatgatcgtgccactgcatgctggcctgggcaacagagtgagaccctgtctcaaacctgaacattctttctaaaaatgcaaatttctagattttttgtaaaatgggaatggcaggaatagtgggtgtccctccatgtcggcccctggctggggcctggggcttcaccctcctcacatggggagctgcagggcccaccttcattccaaggccttccaactgccgacttcagctggcttgtcctggcctgctcctcctcatggtatctcctgtttggcctctgaggtcacccatccaatggccatgatgcttccttaggaagaaacttgtgggggcactgagactgtgagagagagagcaggaaaggccagcttggtgccctgtgctgagctcccaggcctgggtcccctcagtgcaagcattgggtcctctcccacagctgaggccaacagcagctgcttccaaatgtgatgctcccaggctgcactctcaacatctccctgctcaggtttctaaagggcctttgccagctggacactggaaggtacatctgagcctgggtggtgcacaccttggccagcccaactcggctaccctgagcagggctaggggctgctctggaccttcatggaacgggtggttccaagttacattctgcctctgtccctggcctccttcctgggctccctagaaccctcctggcttcttggtggcagcctgctgagagggctcattctgttgcatctggggttcaagcttctgccttggcctttccctgctgtgactgtcaccctccatgtggggcagctttgcacaagtcggccaactgacaggtcagtgctgtgactgccgggccacgtgagcagaggcagagggccgagctggtgggcagagggcacctgtcaccttgactcagctgcctccagggaggagtgacgactcacatcctcacctggggttgccagggctgctcagacgccacagcctgtgcatgtccaggggacatcatcagaggagcgcagctgtcacactggctgcacgactgagcagctttaaatcaggagcaacagaaagagaccccgacggggaggggaactctctactccacccccatcctcagctctgcatcggggagaggcagggtcgaggacagagcccaggaccaatcatggaagtgtcagcgcagctcctgtttctgggacctaccagctcccagccctgtgccagtccccgcagagctcagtgccctgggactcaagacaggcctaacagcgtcctttctgttcatgggaggcactgctggagcttgctgacattggacaatttgctcctggtagtgtgcccatggggagcagagctcagacatgtatggtgtgtctgtccccacagcctactgccagggcaccctgcagtgagaaacagggaggctagagcccagctgctggtctggggccagtggcacccagccttatgctgtccccatggagggaggatgcccagggctcccttcctctccagcagctgcagctgtgtaaatgctggtcaagcagagccccagcacacacaggcagaggtcaggacagatgaggtcatcacagaggaccacacagggctgtcaccacccatgccaggaccctggatggtaagagggcatcctcaccatgtcccagacagcagagacagatgctgtgatttatcctgtggggccaaggtgagctgagggtgtttgtgtggacgcctttgttgggctatggaggtttccttctgctcacaggatgctgacgcccccacttcttgttcttcatcccctgagataaccgcctggttcctgtttctcgttttgttgatgtggtaaattacacagatatttcagctcctgcacctgcctggccttcctgagaggaggcctggctgctcctggcctgtggtctgggttagctgctgctccatgccatttgctggtgtttccctgagagcttctcacacatgtcttttcttgctttagggttaaacttattgttgtgaggtaacaacacaagaattgtacacaggtactcacaccaccaccgctgcatattccccccacagcaatagacactcacattcacactcatgtgggccacacatccacacccccccacccatgcagattgcaccacaaacacactcaacccaccccataccacacacatcacaccacacacacatacccaaagcacacacacacataaatagcaaacacacatacaccaaaaataccaaagacacaccacacatcccatacacacaccacacacatcacacatcatacacgcaccacacaaagggcacacattcccctctctgccacacaacacacacacccagcatgcacccaacaccatacacagcacacacacatcacacacacacacaccccacacacactacacacccagcacatacacatactcacacaccatagacacacatacttgatacacacagaacataccatacaccacacacaacacaccacaagatacacatacacagtgacactgccacacataccacatatcacatacacagcaaatacacacacatcacacatagccctatacatgtacacaagcaccacactcaccacacactatgcacacataccacatgcacattacctatcacacgcacccactacacacacacacatgcaatgccacacacataccacacacaaaacacccacacatcacacatgaccctctacacgcacacagccaccatacacactacaaaccatgtatacatactacacacataccacctatcacatacccccaacacacacatgaccacaaacacacaacacattacacaaaaatagcacacacaatgcaccacacaccacagaaaaacacacactagacacaaaacacacacacattgaaccctcacacacaccacacaacaaatacaccaaattcacacactgcacacccctatacacacatacagacagctacccatactacatacatgtcacataccacacacaccacacacacacatcatacgcagcacatgcacaccatcacaacacacacatactacacaccacaaacacacactacttacacatgtgccacaccacacagaaaatgcacacacatatgcccatcacataccacacacatgtagtacacacacacccacacaccacaaacacacataaccacatacacaggcaacacacacaaaccacagccttttcctcacccccagacgtaggcacagacatttctgccctcagcagggcctcctcagctcttacctcctgcacacacagtgggggctccgcagacctaactgcagtgcaggcctttgatgtgagctggaacacaggaggggtggagcagggcagggagagtgagcctctggccataggagccaggcgcctcagcccctcacatcagcccactcatggcatcaatggtgcttctcagggccttgaagccattctccactgcaaacacatggtccaggctgtctgcaattgttgttatctacagagatgggaggtggcttggactcccggccagggggtgaggatgcagcagatcccaggctcaggggacaatgtctgtctgctttgggggcagcagaatgtcaggctctgagggccacaggcttctccagccagcagcccactcttggggagcggaggagctcttcagccctcccctctggtgtggtgggatttatacgatctgctggtcaatcacttctgcagtggccatgggtcggcccaactcacttgtggcaggttagatgatggggtggccctgggagagccacttgggacacctttccccagtaggctccagagtgacacctgccacctgttctgagtcacccgctcctactcacattggctcatacccacgatgtaaatggtggcccccaggctgagatttatcagcccaggagaaagaaggtgctgagtataaatcacccagggactctggtattccccctacatgaccaccatggggacagcaggtgcttacatccagagttgaaatattccatcttctgaattgccttcaaaggaatgaagaaatattgagcctggacagtgagatgaccccagcaatgttctaagaacttaagaaacttgaatacattatctgtgctctagtggtctgtgccctttcaaatcctctcagtatgaacatttctcctgctggcaacatgtacaaagagccctacatatttctttttgaaaaaaaaaagtaaaaagagggttgagatggagtggggttgactgttaaaaatcggcttccaagctctccaggagccactgttcattgtgcagggcttcctggatggaggagggggccaggcaaggtctctgtcctgctcattcctcactgtgatgttgactagagatttcaaggccttctgagctcatcccagtctcagggaacacaggcctaagtgacctcaccaagggccccacctggaccattgatggtgagagaggaagcttcccatggatgtgcaaaggcaactcaggctctaacagtggaccaacattcctagccctaagcctaactgcaacacagggatgtgcagctgaggtcagggacaggcaataggacaggccttcctaaccatagccctgtgggctctcttgtattgggcactctagccttcaacaggcagggctgagttcaggaaaactcagcccccacagctccatacccccgaccctgactcagtctccccttgtctctttgctataggaagcagcaaaccagctcaattagagtgccagggctccttgacttcctgtgcccctgaaacaaaaagaccaaaggactttgttccttatttcccttcttattgtttatatttgtgattgggttgttttatctaatgattttcctttctctttctcctttgtgtataagttataccagtgagttttatagttttgcattttttcatcatggtggttattatctgttcatttccagatacaagacttccctgagcatttcttggaagtcaggtgtagttgtgataaatttcctagtttttgcttgtctgtgaaagattttatttctccttcattcctaaagagtaactttgctgggtataatattcttggctgttagtggttttctttcagtactttgaatttatcatcccactctctcctggcctgtaaggtttctgctgagaaatctgctgttagtctactgggtatttccttatatatgacttgactattctcttgctgcttttagaattctttctttgtctttactattgacattttgacaataatgtgccttggagaggatctgtttgagtcgaatctgtttggggttctttgaacttcctggacctggatgtatctctctcctaagacttgggaagtcttccaataatatttcactagatgtattttcctcatctttccccttctgcttttcttctggaattctcataatattaatatttgttcacctaatggtgtcctatacatcctgtagatctttgtcaatctctttcattctttgttgtgtgtatcctatgaatatgtaacagtactatttgtcagtgtattaggccatttttgcattgccataaaggaatgtttgagactgggtaatttataaagaaaacaaggttaattgactcatggttctgtaggctttagaggaagcatggtgctgatgtctacctggcttctgtggagacttcaggaagcttccattcatggcagaagatgaaggggaaggaggcatgtcacatggcacaaacaggagcaagagagagacagcgaggtgacatacacttttaaacagacagatcttgtgagaagtcactcataattgtgaggacaatgccaagaggatggtactaaaccattcatgagaaatccacccccatgatccaatcacctcctactaggcctcacctccaatactggagattccaattcaccatgagatttgtgtggggacacatatccaaactatatcatttggttaaaaaataaagtatatagtacagagtctataaaaaagactggaatgggaagccacgtcaaaaaacaggacttgtatagctgacgttgccccaaatctggaaggtcccccaggactgaggtgggtcctgaggtgttaggaccacagggctgctggtgcatgcagctctgtgcatttataagatgaatctatcctgtactagatttgatgggggatgctctaccttgctctggggtcatatgtctaaatggatggcattatatgaaatttttttcccccagtgctggttccaaacttgtccacaccattaaggtgactaacgtactggataagtctgatgatgaaacctgatggcaagggccttgttttctacccaatacaggctgcagggcaaaccatttacataacataaaagaggtttgtgggaaagacagtatcaaaaagtgtggaggaaggggagatagatggttccagatacaccagctacccatcttcagaggtcaccctactcagttcacaccctttagaaatgcttccccattgcctgcaggatccagtccccatgcccaaccaggaagcagcagggggcttcagcacagggatgaagggcgtgcttgagtggccagtgttgagggggaaaagatcccagagttcctgcctggtgctgccctccctctccttggtcctggctctgtctgtggtcagatctcttgcttcctcctgggagtgtcaggctcatatgcagcctcagtgggcatctggggaagccaggcctgtgtctctccagagtgtggggcacagagaagccaaaacacagcatccagggggaggaagtcacctgccagcagcctgcactgccttgcaacacacggccctcatcccatccccaccagggcccagaaaggcctgactgcagccccgagtggccaagggatgtccaccatgggtcctgggctgctttctggcctgttcttgccttcctcttctctattccctggtctcaggcaccttccctcaatgagcagagcatggtcctctcacctgccttacccttgtgtgcccccctaaagcagggctcctttcccattccaccagctcctgcccaggccccattcccacctcatgtttcaattcaggacctgtactcagccagcacatgtccttccaacttttgtacttttcctctaaaactatccctggcttctcctcctcctacatcaaaaataccgttttatttccagattccaaactctctgtggcccacagtggccatcccctaacccataaggctgccaggacccctcccccaggaggagactgaagtcttatctgggtgtgtttctggggacagagctgaggtgagctgaaggatcctgatgccttctggaggcagtgtctaagctgcattgcttcctcatgaccacattgcttttcagggcagtcaggatactttgtgcaaccttattcaccaagctgcaaccaggtgccatagatatggtgccagtgcaggggctgggtgagctggggcacagagaccttcccagtgggctgaaggccatggcttttgcccttgacaattgccctctgggatcatggctcttcagagagccatgtcaggcatctgctgaggagggctgcacaaggcacatcgaaatggtgcccatgggccccccagactgtgtctggacatggaacccattcatttcatttgctggtcacttgaggccaggaatgctgctgggtgtgtttgacaaggttgtgtgggcaaccctgacttgttctaacagggagtaaagataccctccttggtcatcaccttggaaccatgagaaagcaaattgttaagattgtcctcctccttgtaacataatgaggactaatacgtattgagtcttcctgtgggccagttgctagactaagaactttccacgttttcactattttaatcctcccagtaactatacaagtaaatgctactattatcccagtttactgaagggaactgaagcacagagaggttgagttacttgttccaggttacaaagcatgagattcataaagctggatgtgaactgggtctggctcctgctcttcacactgccctgcccctctttggaccagcattcaagacctggtgatggttactcccaaaccactggagagcttccctgctcgggccctggttcctgggtttgcctggagctcatcttcctgtgcttcccgtggtcagatccttggcccagactgagccaggagcctgagggatgatctgatcctcagggtctgtggtgagggctgcactggacacattccctggatcagcccaataaggaacagaggagatcactgaccaggaaggaaggccctccttgggcctaggttggagtctggatgccgtctctagggtgtgaagagggggcttcaggctgcccatgattgagccactccaggaaggcatagactgtcctggtacatcctggtggtatgttccgggctctgggcccagctggctcgtagttaggagtggcggtgaaggtggaatgtgcttttgagccgtcctgagccctgagaagaggtagagagaggctgttgttgtacctccaggctgaagtctgggccaaacctgtagacattctggtcattcttgctttgaattcagttctgagcttggtgtgacctggggaagggaagacaatggttctgtgaggtgaaagagctcccaaacctgtgtcagaagaggagagagacagaaagagacagaaaatgtctatctttagtgctggggaaagagactcagccaagtgctcgtgctctggggctttgagatcagagtgctccctccctcggagcttcagggaaggcagtttatcagaggcaagatcagagctgaggctcaggcttagaagacagctgagccttggcgtgcaaagttagtagatgcagagaagagccctcaaagcagaggggtgagggagggtgcctgagacatggtcgggtcttctaggggctggggatgtgggtgcctggagcttctgctttcagatctccatctcagcccctgctgtctgcagctgttgtaagctcatctcagctacaaggcccacttggtgagctcttttcatcattctgcccaaagagcttgcttccagggcttcaggtgccaccagcatttccccagagttttcatggtggtaagaacgtggctcatgactggtcctttttgtttttgtaaaaaaataaaataaaattttaggatcttctaaatatattatgccaaaggggacgctaagctctggaaactgagtcatgtagcatgcttgcaattctgcttcttagattatagcttaactctcttcctcgttgttctagttctataaatgactaggagagaccagagatcagacatccctctgtccaatcactgatctttgttatcaattacctgcctcctttattgtcctgtttctgagaccagacggtaaccaaaataccttgatatttacatcttcagtgtggaatgttaaatctacctttcccaaaaagaaagaccacctcaactaatcagaccattgtaagtatgcagtacacctttttaagattttgttaaacatcctgaaatttgtctatatgaatgatcccaaacttctacactttggaatactgacctccattctttggactctgtgctttctggtcagcctatccttacactttgtgcttgaataaactctctttaaattgtattttgaccctttgattattttagattgacgttcggccaccttgaagggactcaaagtgcgcctcaactgatccctcctgttatgtcatcgaccaaggctttggtgccaagatgaatgccttttcattcgcccaacttgcaaggactgacaggaatctctgccatggctcctcttgggtttcgaatctctctaattttggtttgagattcagacattattttagtgatccagttccacatttgatggagctagaattgaagctctgcttttaaggtaggagtttcacacacacacaacattagaatatatatattagaatatatccatatatattaaaaattctgctgttcatggatttgtgatttttacttttctctaaggttgcaggttgcttgttgaactacccttcagagtttgtacgtccttttctctcaccacaattttggtcagggaagaaaatagtttccttctctgaaaagaggaggtgaatgtttcatagcataagaaatatttaagaagtatttaagaaataaatactttttatttaaaaactggctaaacgctgaagcttggttcatttggcgtatgtaaagtcactttatgagtgagcaaaaccaatgagaaactttctttgaggataaagatgagtcctgggataagggaaagttttcttctttgccaaaaggaacctcaagcaattaaggtcttgcagaagtgtttgacttcattgcttgtaacatgcgattgagttcatggcttgtaacatgcgattgtcccccaggtaatctccaagaagaacatgcagtgaagcttgtttaccctggtgggcacataagaagggttgttcttccagtgccgtaagtgctcatgattcctggatttagtgagccatgtaaaagagaagaagtgacacaagagtgacaccttgaggagtaaacccccttaagcagcacaccagatccaaaacatctttccctttcagtctttggtcacttgaaaagataatccatttttttcaagatggcggactagggacattggatgccagatctccttaggaagaaggtcttaagttactgttaaatggacaagttctgaactgaaaacagagggaaaagagccaggacctgtcatcgtgcccatagaaagaagctgaggcatggaaaaggaaagcagcaagagtctcgcagagatcaacccccaaggaactcagagccctgtggaaagtgtaggtgggagtgcttctctgctcttctctcctctgtgacaatctactgaacgcccaacttttggagagcaccttttcgcttttgacccagggaaacactattggtagctatttgagaactccccagggacagcaaactgcttggccagcttgtggaggcatgctcacattgccctcagaagcaaactgagattgtgggcaccatactgagtgtgcattgatggtgctcctaccctgactgagaattttctgcccttgagtcactgtaccaccagatccccccctgctctcactttggctagcatggctggtccccagggagttgtgggactccctggagatctaacccttggggtgggctgcccctaaaggaagaggaaaggaaacacagcctgccaaagcccctcttaggataaagagtatgtgggtgtgggccaactgctgcaggggcatcattgatgactgggaacaaatgttaggaggggtttcatctcccacctcccccaccatacactgttgtggatgcaaaggtggtcgtccctgctagggatggtgagcatgaactcaaggaaagtgctcttcatggtggcaccacccctactgaaagtgagcctttgcctgcttccagctttcatgaaggcaaaggcctaactccctcatcctacacagagcagcagcatcctggcaatggaggatagaccatggagttgcctgccatggactaggggaagaggctctgcttcaggccccattttagtgatattcatcagagaggtatatccacagcccccagccacagtgtggctgggaaccaaaggatgaagcctttataaacagaaggtcatgggtcctgtgacaggggtatcgtaggaaagtggatcgcattcctgtcggctcaggatggggatttgcagcacccaccttttctttgcctcaggacctcaatgcattccatcataatctcttcctggtgtattcagggcgaatgcatccattcagcaccagccagcctgccggctcttactcttaagtgctatctactggacagtagcctgaactgcatgagcaaacaaaaaacctgccaccgcaagggcttagtgccagtccatgaaataagcctcctgagacttccacaccctcagccctgcaggagatactgtgtttgcccttacacccaatacatagctataagaagcaacacctaagaaagccactgcactgaagctatacacaaccaattaacctatacagagccttggtcccctgaaagcacccagagatgaagccacacaatcatatacaacatacatgacagccacaccctcaagagaaaaaaataagtttacaaaagtcccatttaaatgacagaaaattcaaatttaagaagctacggctccctcagatgagagggaatcagcacgattctgacagtacaagaagccagagtgttttggcaccttcaaaggatcacacagctgctagaaatgaatcctaatcagactgaaatgtccaaaatgacagataaagaattcaaaatacggatttaagaaaactcaatgagatccaagggaaagttgaaacccaatacaaagaaaccagaaaaataattcaggatatgaaacacaagatagctatattaagaaaaaatgaaatagaacttctggaattgaaaaactcactataggaatttcaaaatactgttggaagctttaacaatagacttgaccaagcagaagaaagaatttcagagctggaagaccattcttttaaattaagccagtcagaaaacaataaataaaaagaattttttaaaacaacaaagtctttgagaaatatgggattgtataaaaagactaaacctacaacttattggcattcctgaaagaggtgaagaaaaagtaagtgattgtgaaaacacatttgataaaataatttagaaaaaaaatcctaatcttgttagagagttggcatccaaacacaagaaattcagagaactcctgtgagatactgcacaagatgggcctcttcaaggcatatagttatcagactatccaacatcaatgcaaaagaaaatgtcttaaaggcagctagagaaaagggcaaaatcacgtatgcagaaaatcccatcagcctaacaacagagttctcggaagaaaccttacaggccagaaaagattggggggcctatttttaggattcttaaagaaaaaaaaaattagtcgagaatattttatcctgccaaactaagcttcatacacaaaggagaagtaaaatcttttctggacatgcaagtactaaggaaattcatgaccactagaccagtcctacaagaaatgctcaaaggagttcttaatatggaaataaataatatttgttaccataaaagctcacataaggccatgtgcagtggctcacctctgtaatcccagcacttggggaggctgagttgggtggatcacctgaggttgggagtttgagaccagcctgaccaacatggagaaaccctgtctctactaaaaatacaaaactagctgggtgtggtggtgcatgcctgtaatcccagctacttgggaggctgaagcaggagaatcgcttgaacccaggaggcggaggttgtggtgagctgagattgtgccattgcactgcagcctgggcaacaagagcaaaacttcatcaaaaaaaaaaaaaaaagaaagaaagagaacacaaaagtgcaaagcccacaggccctataaagctattgcataattgagagtacaaaacagctagctaacaacactatgacaggatcaaaacctaatgtatcaatattaagtttgaacaaaaaaggcctaaatgttctacttaaaagacatagaatggcaaattggatagaaaaacatgagacccaaccgtctgctgccttcaagagaccaacctcacatgtaatgacacccataggctcaacataaagacatggagaaaaatctatcacataagtggaaaccaaagaagaacaggagttgctattcctgtatcagataaaaccaatagtaaaaaaaaaagacaaagaaggtcattatataataataaaggatttaattcaacaagatttaagtaatttaaatatatatgcacccaacatcagagtacccagatttataaaacaaatactactagacctaagaaaacagatagatatccatacaataatagtgggggactttaacaccccactgacagcattagacagatcattgaggcagaaaactaataaagaaactctggacttaaatttgacacttcaccaaatagacctaagaaatatctacagaatacttgacccacaagcacagaatagatattctctgttcatgaaattctctcatcctgatcacatgcgaggtcataaagcaagtctcaatacattttttaaatgacaccatatcaagcatcttcttggaccacggtgctataaaatttgaaattaataccagaaagatcttcaagacaacacaaaggcagggaaatgaaataacttgtttttgataacttttaggtaaacaacaaaattaagtcagaactcaaaaaattctttgaaacaagtggaaacagagacacaacacaccaaaacctctgggatatagcaaaatgttaagaggaaagctcatagcactaaatcctttcatcaagaagatagaaaggtctcaatttaataatctagtatcacacctaaatgaactagaaaaataagaacaaagtagaccctaagctagcagaagaaacaaaacaactaagatcagagcagaactaaataaaattgagttcaaaaaacccatacgaaggatcaatgaaaggaagagttgggccattagacccattgagaaactgctagctaaattaaccaagaaaaaaagagagaagatctgaataaacacaatcagaaatgacaaagatgatattacaactgataccacaaaaatacaaagatcttcagagactactatgaacacctctatgtgcacaaactagaaaacctagaggaaatgaataaattcctggaaacacacagcctcccaagattgacctaggagtacttgaactcctaacagatcaataatgagttaagaaattgaatcagtaataaaaatctaccaaccaaaagtgtcctagactagagggattcacagccagattttaccagatgtacaaagaagagctggtaccaatcttactgaaactattccagaaaaatcaaggaggagggattcctccctaactcattctgtgaaaccagtatcatcctgatatcaaagtctggcaaagaaacaacaacaaaaaagaaaactgcaggccagtacccctgatgaacatagatgcaaaaatcttccacaaaatactagcaaaccaaatctagcagcacaccagaatgataattcttcacaatcaagtgggctttatacctgtgatgtgaaatgattcaacacatgcaaatcaataaatgtaattcaccacataaacagaattaaaaaccatatgatcatctcgatagacccaggaaaagcatttgacaaaattcaacatcccttcatgataagaaccctcaacaaagtaggcatcaaagaaacatacttcaatttaataagacccatctatggcaaaccacagtgaacattatactaaatgggcaaaagttggatgcatttctcctaagaactggaaaaaggctaggatgtatactgtcaccactcctattcaacatagtacaggaagtcctagccagagcagtcaggcaagagagaaaaataaaaggcatccaagtaggaaaagaggaagtcaaatgatctgttccctgatgacataattctatacctagaaaacacttagggttcctccaaaagactccttgacctgataaacaacttcagtaaagtttgaggatacaaaatcaatgtacaaaaatcagtggcatttctatacagcaataatgttcaagctgagaaccaaatcaagaatgcaatcccatttacaatagacacacacacacacaaataaaatatcagggaatacatttaaccaggaaggtgaaagatatctatgaagagaaccacaaacactcatgaaagaaatcatggatgacacaaacaaatggggaaacattccatgttcatgaactggaacaatcaaaattgttaaaattaccatgcttcccaaagcaatctacagattcaatgcaattcctatctgattcccaacattgttttttcatggaattagaaagactaattctaaaattcatatggaattaaaaagcctaaatagctaaagcaatcctaagcagaacaaacaaacaaacaaacaaaacaaagcctgaggtttttttcatattacccaacttcaaactatactacaaggctatagtaaccaaaacagcatggtactggtacaaaaatagatacatagatcaatggaatagaacacagatcctagaagtaaagctgcatactgacaactaactgatctttgacaaagttaacaaaataaacaactgggaaagaacaccttattcaataaatagtgctgggaaaactggctagccatatgcagaagaataaaactgaatccttacctctccccatatataaaagttaactcgagatggattaaagacttaaatgtaagacctcacattgtaaaaaccctagaagaaaatataataaaaactcttctggacattggtctaggtgtagatttatgactaagatcttaaaggcaaatgcaacaaaaccaaaaactgacaaatgggacctaattaaactaaagagctggaggattgctggcaagatggccaaataggaacagctctggtctacagctctcagcaagatagacccagaaggtgggtgatttctgcatttccaactgaggtacccagttcatctcactgggactggttggacagttggtgcagcccacagaggatgttccaaagcagggtggggcgtcacctcatccaggaagtgcaagggataggggaattttctcccctacccagggaagccatgacggactgagcctgaggaactccggcacagatactgtgcttgtcccacggtctttgcaacctgcaaagcaggagattccctctggtgactaccctgctagggccctgggtttcaagcacaaaactgggaggccatttgggcagacaccgaactagctacaggagttcttttattttcatacactagtggcacctggagcgccagttgagacagaaccattcactcccctggaaagggatgctaaaaccaaggagccaagtggtctggcttggtgggtcccacccccacagagcccagcaaactaagatccactggcttgaaattctcactgccggcacagcagcagtctgagatggacctggggcgcacaagcttggtggggggaggggtgtcctccattgctgaggcttgagtaggtggttttatgctcacagtgtaaacaaagccactgggaagttcaaactgggtggtgcccactgcagctcagcaaggctgctgtggccagactgccagatttctcttctctgggcatggcatctccgaataaaaggcagcagccccagtcagggacttatagataaaaccccaatctccctgggatagagcacctggggaaagaggtggctgtggggcacagcttaagcagatttaaatgtccctgcctgacagctctgaagagagcagtggacctcccagcacagtgttcaagctctgctacgggtcagactgcctcctcaagtgggtccctgacccccgtgcaccatgactgggagacacctcccagtagtggccaacagacacatcatacggagagctctggttggtatctggcaggtgcccctttgggatgaagcttccagaggaaaaatcaggcagcaatctttgctgttctgcagcctccactggtgatacgataccaggcaaacagggtcaggagtgggcctccagcacactccagcagatgggcagcagaggggccagactgtcagaaggaaaactaaaaagcagaaaggaatagcatgtccattcaaagaccccatctgaaggtcaccaacatcaaaaccaaaggcaggtaaatccacaaagatggggagaaaccagcacaaaaaggctgaaaattccaaaagccagaacgcctcttttcctccaaaggatgacaactcctcgccagcaagggaacaaaactcgacagagaatgagtttgatgaattgacagaagtaggcttcagaaggtgggtaataaacccctccaagctaaagaagcatgttctaacccaatgcaaggaagctaagaacctcgaaaaaaggttagatgaattgctaactagaataaccagtgtagagaagaacataaatgacctgatggagctgaaaaacacagcacgagaacttcatgaagcatacacaattattaatagccaaatcaatggagtggaagaaaggatatcagtgattgaagatcaacttaatgaaataaagagagaagacaagattagagaaaaaagaataaaaaggaatgaacaaagcctccaagaaatatgggactgtgtgaaaagaccaaatttacatttgattgttgaacctgaaagtgacaaagagaatggaaccaagctggaaaacactcttcaggatattatccaggagaacttccccaatctagcaagaaaagccaacattcaaattcaggaaatacagagaacaccacaaagatactccttgagaagagcaaccccaagacacataattgtcagattcaccgaggttgaaatgaaagaaaaaatgttaagggcagccagacagacagattggattatccacaaagggaagcccatcagactaacagcggatctctctgcagaaaccctacaagccagaagagagtgggggccaacattcaacatttttaaagaaaagaattttcaacccagaatttcatatccagccaaactaagcttcataagtgaacgagaaataaaatcctttacaaacaagcaaatgctgagagattttgtcaccaccaggcctgccttacaagagctcctgaaggaagcactaaacatggaaaggaacaactggtaccagcgactgcaaaaacataccaaattgtaaagaagcctaaatagccaaagctatttacaatttatgaagaaactccatcaactaatgggcaaaacaaccagctagcatcataatgacaggatcaaattcacacataacaatattaaccttaaatgtaaatgggctaaatgccctaattagaagacagactggcaaattggataaagactaaagacacatcagtgtgctgtattcaggacactttgcacccatctcacgtgcaaagacacacataggctcaaaataaagggatggaagaatatttaccaagcaaatggaaagcagaaaagcaggagttgcaatcctaatctctgataaaacagactttaaaccaacaaagatcaaaagagacaaagaaaggcattacataatggtaaagggatcaatgcatcaagaagagctaactatcctaaatatatatgcacccagattcataaagcaagttcttagagacctacaaagagacttagactcccacacaataatagtgggagactttaacatctcactgtcaatattagacagatcaacaagatagaaaattaacaaggatattcaggacttgtactcagctctggaccaagcgggactaatagacatctacagaactctccaccccaaatcaacagaatatacgttcttcttagcatctcattgcacttattctaaaattgaccacataattggaaggaaaacgcccctcagcaaatgcaaaagaatggaaatcataacaaacagtctctcagaccacagtgcaatcacattacaactcaggattaagaaactcactgaaaaccacacaactacatggaaactgaacaaactgctcctgaatggctactgggtaaataatgaaatgaaggcagaaataaagatgttctttgaaaccagtgagaatgaagacacaacataccagaacctctggaacacatttaaagcactgtgcagagggaaatttatagcactaaatgcccacaagagaaagcaggaaagatctaaaattgacaccctaacatcacaattaaaagaactagggaagcaacagcaaataaattaaaaagctagcagaagacaagaaataactaagatcagagcagaactgaaggagatagagacatgaaaaacccttcaaaaaatcaatgaatccaggatctggttttctgaaaagatcaacaaaatagactgctagccaggctaataaagaagaaaagagagaagaatcaaatagatgcaataaaaaatgatataggggatatcaccactgatcccacagaaatactgaccaccaccagagaatattataaacacctccatgcatataaactagaaaatctagaagaaatggataaattcctggacacacacaccctcctgtctaaatcacgaagaagtcgaatccctgaataaaccaataacaagttctgaaattgaggcagtaagtaatagactgctaaccaaaaaaagtccaggaccagatggattcatagccgaattctaccagaggtgcaaagaggagctgataccattccttctgaaaccactccaaacaatagaaaaaaagggaatcctccctgactcattttatgaggccagcatcatcctgataccaaaacctggcagagacacaacaaaaaagaaaatttcaggccaatatccctgaagaacatcaatgcaaaaatcctcaataaaatattggcaaaccaaatccagcagcacatccaaaagcttatccaccacaatcaagttggcttcatacctgggatgcaagtttggttcaacatacgcaaatcaataaatgtaatccatcacataaacagaaccaatgacgaaaaacacatgattatctcaatagatgcagaaaagacctttgacaaaattcaacaccccttcatgttaaaaactcttaataaactaggtatcgatggaacatatctcaaaataataagagctatttatgacaaacccacagccaatatcatactgaattggcaaaaactggaagcattccctttgaaaaccggcacaagaaaaggctgccctctctcaccactcctattcgacatagtattggaaattctggccagggcaatcaggcaagagaaagaaataaagtgtattcaaataggaagagaggaagtcaaattgtctctgtttgcagatgacatgattgcctatttagaaaaccccatcgtctcagcccaaaatatccttaagctgataagcaacttcagcaaagtctcaggatacaaaatcgatgtgcaaaaatcacaagcattcctagacaccaataacagacaagcagagagccaaatcatgagtgaactcccattcaccattgctactaagagaataaaatacctatgaatacaacttacaagggatgtgaaggacctcttcaagcagaaccagaaaccactgctcaaggaaataagagaggacacaaagaaatggaaaaatattccatgctcatggataggaagaatcaatatcgtgaaaatagccatactgcccaaagtaatttatagattcaatgctatccccatcaagctaccaccgactttctgcacagaattggaaaaaactactttaaagttcatatggaaccaaaaaagagcctgcatagccaagacaatcatgagcaagaagaacaaagctggaggcatcacactacctgacttcaaactatactataaggctacagtaaccaaacagcatggtactggtactaaaacagatatatagaccaatggaacacaacaaaggcctcagaaataacaccacacatctacaactgtctgatctttgacaaatctgacacaactgaaactggaccccttccttacacatatacaaaagtcaactcaagatggatcaaagacttaaacataagacctaggaccataaaaatcatagaagaaaacctgggcaataccattcagtacataggcatgggcaaaagactttaaaacacaaaaagcaacggaaacaaaagccaaaattgacaaatgggatctaattaaactaaagagcttctgcacagcaaaagaaactatcattagagtgaacaggcaacctacagaatgggagaaaacttttgcaatctatccttccgacaaagggctaatatccggaatctacaaagaacttaaacaaatttacaaggaaaaggccaggcgtggtggctcacacctgtaatcccaacactatgggaggctgaggtgggagaatagcttgaggtcgggagtttgagaccagactgaccaacatggagaaaccctgtctcgactaaaaatacaaaattaaccgggtgtggtgatgcatgcctgtaattccagctacttgggaggctgaggcaggagaatcgcttgaacctgggaggcggaagttgtggtgagccaagatcatgccattgcactccaggctgggcaacaagaacgaaactcgatctcaaaaaacaaaaacaaaaacaaaacaaatttacaagaaaaaaaacaaccccatcaaaaagtgggcaaaggatatgaacagacgctttttcaaaagaagacatttatgcagccaacagacatgaaaaaatgcccatcatcactggtcatcagagaaatgcaaatcagaaccgcaataagataccatctcacaccagttagaacgacaatcattaaaaagtcaggaaacaacagatgttggagaggatgtggagaaataggaatgcttttacactgttggtgggagtataaattagttcaaccattgtggaagagtgtggtgattcctcaaggatctagaactacaaataccattccacccaacaatcccattactgggtatatactcaaagaattataaatcattctactataaagacacatgcatacatatgtttattgcggcactattcacaatagcaaagacttggaaccaacccaaaagtccatcaataatagactggataaagaaaatgtggcacatatacaccacagaatactatgtagccataaaaaaggatgagtttatgtcctttgcagggacatggatgaagctggaaaccatcattctcagcaaactatcacatgaacaggaaaccaaacactgcatgttgtcactcataagtgggacctgaacaacaagaacacatggacagggaggggaacatcacacacaggtgcctgtttgggggtggggggctaggggaaggataacgttaggagaaatacctaatgtaagtgacgggttgatgggtgcagcaaaccaccatggcacgtgtatacctatgtaacaaacctgcatgttgtgcacatgtaccccagaacttacagtataattaaaaaaagaaaaaaaccatgaaaactaaagagcttctgcacacatacatacacacacacactaacacacacacacacaaaacactatcaacagaataagcagacaacctaaaaaataggagaaaatatttgcaaactatgcatccttcaaggtactaatatatagaatctataaggatcttaaacaaatcaacaacaaaacctccaactgactccattatcaaatagacaaagggcatgaacagatgcttctcaaaagaagacatacaagtgtccaacaaacatataaaaaaatactcaacatcactaattatcagagagatgcaaatcaaaaccacaatgagataccacctcacacgagtcagaatagctcattaaaaattttaaaaataacagatattggtgaggatgcagagaaaagagaatgtttatacactcttggtgagaatgtatattagttcaactcctatagaaacagtacaaagatttcttttaaataatttttttttccggagcatatgtgcaggtttgttatataggtaaactggtaccatgaaggtttgttgtacagattatttcatcacccaggtattaagcgtcatacccaatagttattttttctgctcatctccttcctttcaccttccatcctctagcagatcccactgtctgttgttcccttccttttgttaatgagctctcatcatttagctcccacttgtaaatgaaaacatgaggtattttgttttctcttcttgcattattttgctaaaaataatagcctccacctccatccatgttcttgcaaaagataggatcatgttttttatggctgcatagtattccacagtgtatatgtaccacttttttttttaactctaatctgtcattgataggcatgtaggttaattcgacgtctttgctattgtgaatggtactgcaatgaacatttgcatgcatatgtctttatggtataatgatttatatcttctccaaatcaagggcatctggaatataacttactgcggaagtggcagaaggtctgttatatgcctctgagaccctcttcccaggaaaactctgggctactaccagtgatattcactcagctgtgggtgcagtgactgttctgtattcatgagccaggggccttgccttatggagtggggatgggggttcccagaaaagaggggctggactcctctctgtatggtggctgcaatatgctggaggtgccagtataatgactaggccctttgctccttcccagttctaggactgttagggctgcgccactgcaactgtagtggcagagaggttgtggcttgactctgggattacctccttggggaatgctgggctgcttctgattgtggtgatcagggaggggcagggtggttgtgccggaatccaggtcgggtggccctgcccagtgaggagaagtaagaactgggatctgcatggagaatagtctggctgcttttccgagagaaagttgttctgtgctgggggtttggaccagcccctggttcccacagactcttccatgcctggagacagcaagagcaagggttgcaagacagcaaagatggcaacccacccctcccactgggagctccatccagggagttgcagagctgctcctggctccatagccctggtgggggtggctggaggcctgggccttaagcaccttcccagtgaggagatattggaatgggcatccatgtaacagtctgtccacttttccttagggctgctgcagtatgctgggagtccactctagtccctagttacctctgattttccagtactgtctccctggatgggggagatttccctggttccatgtgtcttcctggtgggctgtggtcctgccttacttttctccattttctgtgggtagagttgttttcttgattagtcccaatgtgtgtacctggatgtttcagttgaaggtgctgcatttacttgccctttcctttcctctctgtgagagtggtgcacattagctgcttctaatcagccatcttggccacttcagaattggagatttcttaaagaatgaaaaaaatagaactatcgatggacctagcaatctcactactgggtatctaccaaaagcaaaatacatttttctatcaaaaagatacctgcaatcatgtttattgcagcactattcacaatagcaaagtcattgaatcaacctaagtgccaattaggattgaataaagaaagtgtggcacatatataccatggaatattatgtggccaacaaaaagattgaaatgtcctttgcagcaatatggatgctgctggaggcccattatcctaagcaaattaaaacagaaacagaaagtcaaatactgcatgttctcacttgtaagtgggcactaaacattggatactcatggacataaagatggaaaaaatagacaactaaggactccgtaagtggggaaaaagggaaagcaaggtgtaaaaactacctattggatactatgttcactatttgggtgatgagttcagtagaaacctaaagcccagcattatgcaatatcctatgtaacaaacatgctcatacatctcatgaatcttaaaaaaaaataaaaaaagagagagctcaggttatgagcaatcatccctttaagaccaagtcagtcttcttgatgagagatccccctttagaaactccagcttgattcgtgtatttatagatttatagtaccatctcctgtcagtatctagaaaaatgttcttacctaatctatgaagacttaaaactaaaaaggtctaaatgggatacctttgatatacctaaattcttttatttatgtgcagtgatatgcacctccatatcttgttaaaataaataatttatattttgatttggaggtgacaaaatatcactgcacataaaaattaataaataaattactaatattaaaataatttttatttatgtgcaatgatgttttgtcacctccaaatctcatgttgaaatgtgatccccaatattggaggtgacgcctggtgggaggagtttctgtcatgggcgtgggtcttgcatgaatggcttagtgtctcctcacagtaatgagttcttgctctgagttcatgcgagatctggtcgtttaaaagaatgtggcacctcccccgtctctctcttgctcccactcgtgccatgtgatatgccagctctcccttcgtgttctgccatgattgtaagaatcctgaggcctctccagaagctgagcaaatactggcaccatgcgtcttgtacagcctgcagaaccatgagccaataaatctcttttctttaaaaattactcaatctcacatatttatctataataatgtcaaaatgggctgatatgagtctcatgccccttccagtagttctggtgtttcatgatgagtatcttctctccaaggacaaaattgggtataagatcagaaatgtattcatgttttggccgggcacagtggctcacgcctgtaatcccagcactttgggaggtcgaagagggcggatcatgaaagcaggagatcaagaccatcctggctaacacagtgaaaccctgtctctactaaaagtacaaaaaattagccaggcttggtggcacgcacctgtagtcccagctacccaggaggctgaggcaggagaatcgtgtgaacctgggaggtggaggttgccatgagccaagatcgtgccactgcactccagcctgggtagtgagactctatctcaaacaaaaaaaagaagaagaagaagaagaaaaatgtattcatgtttctctaaacagtcactgatgcttgacactagtatgactaaggataaagtatgccactggcctattaataatactttacagagtaaagagcatgggaagagcttctcagtaaaagaaactagttcgttacctgatatggtttggatttgtgtccccgcccaagtctcatgttgaattggaatctccagcattggaggaggagcctggtgggaggtgattggatcacgggggcggatatgccccttgctgttctcatgacagtgagtgagttctcatgagatctgattgtttataagtgtgtggcacctcccccttctctctattcctttactctggccatgtaagacatccctgctttcccttcaccttccaccatgattgcaagtttctggaggtctcctcagccatgcttcctgtacagcctgcagagccaattaaacctcttttccttataaattacccagtttcaggtatttatagcagtgtgagaatggactaatacattacctttaacactgatggtgccccgtcagagggatgaaacaaaattgcctcatttgagagataagacaactcaattttaggatagtataacacaaatttgggactgttttatctgccttaccctctgctgtggtcagctcagtcaacttgcccgtttgttttgtgaacagataaattataccaaaaatgccttactcaacaacactgaagatatgggatgaatatccaaagaatgatatatccgcactattacattacaaagtactgattggcatgatggtgaacaggcacaatgagcaagtatttattggttagctccaaatggaatgtcttggctatgtagtactaacttctggccatggttacccccaggatggttaagaccatgttccttggcttatgcttgggcacaggttaagtagttcataccctgtcaaaatctgcaaatttttctcacagtctcgttgtgttcattctgtgtttcatcggtatgatcatttagctttcatctttataccacaaatcaggtattaagaatatcatttgtcatgaagatatcctaaccaattatacacaaaaggccctaaataatagctgcatggatatgtcattgctaaacaagtaagttgcttttatgagaactgctacattacagaagagtatggctttagacacactcagtgcagcctgaggaggaacttgtacatcagaaaaactcagtgttgtgtctctaccccagatgaattgaacaacttcatgaaattaatcacgggtatacaaattcaaataactaacttttcagattctatactctctgattagttatgcagctggtttgtatcttggagaacttggtgtaaaaaactgttactaattctgggaattataatcatttgttgtgttttgttctgtttttgtctacactgctgttatggcatgtgtttgcaatcgagtcaatgcacaaccaaaagcggctagaataatggttgctcagagaactgctttgaacaaagaggcagtcatgtggcctgaatcaggtttgaggaccacttctcccctgtttactttatacgttggctttagttctttctaattcttcccctattggacatgacttcctacgaatgagccttcctagtagggtgagattttgacttaaatacatgattcttctgccctgttttctctgaaataatttgaagaaaatgaagaaatgtaaaagaagtaaaatgtccagaacttctaaatttattatgccaagggggaagttaagccctgaagactcagtcacatgccgtgtttgcaattctgcttcatagattatagcttaattctctctcatttttctagttctgtaaatgactaggagataccagagaccagaacgcctcccttcccatcattgatgcttgttatagattacttgcctcctttgttgtcctgttcctatctgagaacagagggtgctcaagacctcatgatagttacatctttagtgtggaatgttaaatatacctttcccaaaagagaaagactatctccactaatcagatcattgtaactatcattaagcttcacatggacagatgttacaattcagtttaactttcctgaactttgtctgtataaatgttctctaacttctccactttgtaatactgacttgttttttggaatctatgcttcccagttggtccatcctcaatcttttcaagtgaataaattatctttaatctacattctgaccctttgattattttacgttgatatttttctgacctgcgggagactctttgtgactcagtttgtttgactcataaacccgcaggccactggtttgaaacctaagccactaccagagctgattacaacctctgggagagccaggactggtcagacgtcactagctgctatatccagaaacctggctccttcaaagagaaactccttgtgctgagacaggcctggtggtgcaggggacaggagccctcatgcttgccctccactgggacactagggtgaggtgggcctctggttgcccctggcatcaagtgaccaaaggccgacacccatagagcctgccttcctccagggcccaggcctctgtggcaggatccggctgccccctcctcccacagtcccagcctgggggtcacagcccctctccactgtgcttctcacctctatccctcttatcctgcacactccttggcacccacagcaataaacaatcacagtggggcaggtgttcacaggaggcgggggcagtggtgatggaggaggaggtggtttctcctattctggctcctaaaaaatgaaaaacagaactgtctgcttcctttccgggcagatcctgggtgcaaggccatggtgtcgttgcctcagcaccaggcacagtgctgaccactcccagatgtgtatctggggaatgaaaggactagtgaggagcccacaccacaggggagaatcttttgtgtgagaaacatgcaaactcctcctggtttgcagacatggtttttcccctaaatgccaacgacttcgtctctgtccctttgtttcttccgcggccagccctgttgaaagaggcctgctctgggggctgtgcaacagtcccagcatttgcagatgactgtctgcatccacctggttgcagatgcagcctccctgagcccactctggagcaccgcagaggccagccttggccagggaggcctgttcccaccccatcccaggcccagggcctcctgcgtcagctactgccctcaccacagcctatggcccctggggtgggtccctggcccagaagcctgcttccagactcctggcccctgtgttcactgggctgggtgtctctcccagttcggtgcctgccaggactcccgcatccctagaagctaaccccagccagcccctcgtccctgccaggagacagggatccagagaggccaaatggagccacatctgcatccggagcctggggacggggccaggtccctaaaacacggggctccttttccagagcgcctccgtccttagcatcttatacatgctctgtggaatattgagaggcgagccccatttattcaggagagatcatcacagttgctgaaactggccaccccaggctgtgaattggtgagaagcctcattttgaggggtgcagggagtgggaagggcgtgctggggacatcactgtgagtccccacccttctcaggcttcactctgcccctctgtcaccctcttctctgcctcggcaggtggaggtcatggggcgcagccttcatggcactcttggtgaaggtcagtgggctccttgggatgtgacaatatcgggaccggaactgcgacttactttttctggcttctgcacaggtggtggatccttgacagtctagaatgttcaaaagagaaaaacgtgggctggatgggggtggacaggctctgccttggccctgcacagagctcggaccctggtctggagcagggctggatgggggtgggctggctttgccttggccctgcacagagctcggaccctggtctggagcagggctggatgggggtgggctggctttgccttggcccagtacacagctgggaccctggtttggagcagggctggatgggggtggggcagcaggacagagcatggtctggaccctggtttggagcagcaggaaaggacaggacatggcctttgggtgccacctgggcactctgagcctgtggtgtacccagcaggctcctcctcccaggcctcagcctccaaccttacccaagggaaactcctgtacagccgttgtggggttcctagggctcagccaggccagggaccaggtccctagagaggcccagtccctgcaagtgtccttctctgcccatagccatatggaaaagagagagcccaccctacttaccttcctcagggagagcctgtctgtccctgggagacttccctgacctcccagcctcatggttgagtccccggcttccttccctcgtggctccctgggcagagatgagacctgtctgttctctgggctgggctctgtcctctcctccccctgctctgtctgtctgcagctctctgggctgggtccgtgcaccccagctccaagggcctctatcaccctccccgccctggactccatctctgcttttgactcctgctctgccttacagggggcccttcccattcctgtggggtgggtatttcaccctcatccctgaccagacaggactgtgagctccctgtggggaactgtggctgcttcatttctgtccctccccagcccagcatggggcccaggggaaactggagctcagtaaagacagatgaaggaatgtggaaggcaccagacatatgccaagatccatactggtttcccaaggcacagacagctgggggttacagcaccatcctccatttgggccagcagggcctcatgggtgaccctctcttcctccctccacacagaggccacctcctggcccttgtccatctgaggcttccagaagtccagcttgttgaggcagccctggtttcaggggttctggggtcacttctctctaggagccagggcaggcctcaaccccatgtccagggcatctcaggccagctgtgaccagccgtggcaggaggtcctacagaagcccaggcctcctagactctgtgaacgtgtggacagcttcccttggctcatgtgatgacctgggaactgatgagaaacttcccacaggtgggatcacacggcagtcacatgctgaagtcccttggaggttgggcctgtgtctgagccccagggctgggcgggcagggagcacttaagggagcacttattctcctgccacatagctgccagaaaccacaaagcagcagcagggtcaggagcagggccggcaggacctggatgattagtgggttgctagtccagccctctggttgacttgcctcctgtgatggaccagtgtcctatgacggcagatgggtgctctctgatgaacaagtggtctgtgatggacgggtgctctgtgatagatgggtggtgtgtgattaatgggtgctttgtggtgaatgggtggtctgtggtggatgggtggtgtgtgatggacgggtggtttgcggtgaatgagtggtctatgatggatggatggtctatgatggatgggtggtctgtggtggatgggtggtgtgtgatagatggctggtttttggtggaagggtgctctgtgatagatggatattctgtggtgaatgggtggactgtggtggatgggtggcctgtgatggatgggtggcctgtgatggatgggggctctgtggtgggcgagtggcctgtgatggatgggtgctctgtggtgaatgggtggcctgtgatggatggctggcctgtggtggatgggtgctctgtggtgaatgggggctctgtggtgaatgggggctctgtggtgaatgggtggcctgtgatggatgggggctctgtggcaaatgggtggcctgtgttgaatggctggcctgtgatggatggctggcctgtgatggatggatgttctgtggtgaatgggtggcctgtgatggatggctggcctgtgatggatgggtgctctgtggtgaacgattggcctgtgatggctggccagcctgtggtggatgggtgctctgtggtgaatgggtggcctgtgatggatgggtgttctgtggtgaacgagtggcctgtgatggatggctggcctgtggtggatgggtgctctgtggtgaatgggggctctgtggtgaatgggtggcctgtgatgaatgattggcctatgatggatgggggctctgtggtgaatgggtggcctatgatggatgggggctctgtggcaaatgggtggcctgtgttgaatggctggcctgtgatggatggatggcctatgatggatggatgttctgtggtgaatggctggcctgtgatggctggctggcctgtgatggatgggtgctctgtggtgaacgattggcctatgatggctggccagcctgtggtggatgggtgctctgtggtgaatggatggcctgtgatgaatggctggcctgtggtggatgggtactcagtggtgaatggctggcctgtgatggatgggggcactgtaatggatgggtgctctgtggtgaatggctggcctgtgatgaatggctggcctgtggtggatgggtgctctgtggtgaatgggtggcctgtgatgaatggttggcctgtggtggatgggtactcagtggtgaatggctggcctgtgatggatgggggcactgtaatggatgggtgctctgtggtgaatggctggcctgtgatgaatggctggcctgtggtggatgggtgctctgtggtgaatgggtggcctgtgatgaatggctggcctgtggtggacgggtgctctgtggtgaatgggtggcctgtgatgaatggctggcctgtgatggatgggtgctctgtggtgaacgactggcctgtgatggctggccggcctgtggtggatgggtgctctgtggtgaatgactggcctgtgatgaatggctggcctgtggtggatgggtgctctgtggtgaatgggtggcctatgatgaacggctggcctgtggtggatgggtgctctgtggtgaatgggtggcctgtgatggatgggggcactgtaatggatgggtgctctgtggtgaatggctggcctgtgatgaacggctggcctgtggtggatgggtgctctgtggtgaatgggtggcctgtgatggatggttggccagtgacagatgggtgctctgtggtgaatgggtggcctgtggtgaatggctggcctgtgatggatgggtgctctgtggtgaatgggtggcctgtgatggacgggtgttctgtggtggatggttgctctgtggtgaatgggggctctatggtgaaaaggtgacctatggggaatgggtggcctgtggggagtggttggcctgtggtggatgggtggcctgtgatggatgggtggcctgtgatgaatgggtggcctgtagtggacaggtagtctgtggtggatgcatgttctgtgatggatggatggcctatgatgaatggatgttttgtgatggatgggtgttctatggtaaattggtgttctgtggcgaatgggtggcctgtggtggatgactgttctgtggtggatgggtgctgtgtggtgaatgggtggcctgtggtggatgagtgttctgtggtggatgggtgatctgtggtggatgagtgttctgtggtggatgggtgctctgtggtaaatggctggcctgtgatggataggtggcctgtggtggatgggtgttctataatgaatgggtgctctgtggtggatgagtggcctgtggtggacaagtagtctgtgatggatgcgtgttctgtgatggatgggttgcctgtggtggatgagtggtatgtggtggactggcaccctgtaggagaaaggtattaacacgcactacacctggtagacaatgcgaatgtcagtggcctgggtggcctcttcccagtgcccaccatttggaggcccatctgcccactcctcattctccctagctggtccctcctccatgtaccacagtgaggctagcagtcagggctggtccccagagagctacagacccctccttcggtcctgcttaaaggctctgccctagagccctgccaagaaagtcccagaagcttcctggtctcatgaacctagcctcactgaacacctcgcttgcagcacagggcttctgtgaggaccacaaaatctacaggtacaaagacaggtgagggtgggggtgctgtgtccaagagaggtgcaggcgcaggagcaggggcaggagacccgggtccatcacccacagcctctctccccacttccaggctctgcaccgtgggcacatccgtgcaccgctctgagcctcagcctccacacttgtgcaaagggaataagccgccctccctgggggcacttgtgaggtttagagagctcagaaaaaggcctggctcagaaccagggccacatggggtgtaagcaacgggaactcttccctgggtgttcttcacagtaaagggactttgggcggcaaccttgggaatgcaggctgcccagggcttccccaaatccagacttctgcttagagagaaggctagggagggaagaggagagagctcgtgctgggcctgagcctggcctgtacgcctaacagcctccccatcggcagcaggagaagacatactgcagggctcagtgagggagcagagagggacagctccggggcccaagcaggtaggagggtcagaaaggaggctgacagcatctgggaaatgacagcagatgaccaccaggcaggctcgggcgacagggttgtgagtgggtttaggatcatatcagcagctggggcaccggttcagcggcacacgcatcctgaaggtagtgcgtggaatcctccagatcccctggacctgagaggcccacgtggagaaggtggagaccctagaggtcctggattctggctcctggcacacagcctccaatcctcatccaccagtgccagctggaacaggatcaagcaggcccaggtgcctgctgcacacattacttttctgggactgcctgggaactgtgtgctctttctgtcctccccagggtgtatctcattccagtgcagggcctctggacagcccaggttggtggcatccccaccctggtactcacacaggtggtgctcttcatagtgatgtcattagaaaggacatttctgccattgttcaggctggcttcaacaaagacctccttaaagcacagaaagcgaagatggtgagagccagcccggagagatgcagttcttgcccttggtgagtagacagcatgggtaatgctctcattccccaaagcactgaggtcaacctcagcaacaatggccaagggggatgtgggtccagcagcaaggggccctgcatgagatttcatgtcattgtgactgtgtcctaagtgaccacaaatggctgcttggtgtcaaccattctggctcttctgtatttacagagtccattggcttaactctgaaaggcgacctggagcaacggtaccattcctcgggcaatcatctcctgcatcctgccctcctcacagaccctaggacactgcagatccctaggacactgcagatccctgaacaccttgggggccaccaacaagggaggtgagcaatgtgttctcagcccagccgcagacacgtgctgccccagcaggggggcatccacattctgtacacctcacagtgcccagctgtgacccctggcctcctgccctctagagcctcctgccctctagagcctcctgccagggatacttactgtccaggttgtttttaatctttggtccagggcaagtcatgaaagtcttgtccatactgattgtttttttttctaaaaggaaatgacatgggaagaatgtcgatgcacatgttcgtccactgttcctcccacctccggtcctcatcacgcagagcggaccctgtggtccacgactggcatctgggctctgctttcccattgcagagacccctgtgagcacccgccacgcccaggccctgtgcagcactctgatgtgtaacaggaaaggcaggcagagtccctgctctcaaggactcacctttaaggactgcatgggagacagacaacaaaattaaaaatagagaacaaaatagatggcagagtgcaacgtgctgtgatgtccatgagcagagggaaggagaggcacagagagaaagggacagccgcttcgtcacaggcgaccagaagcattcgtgtgatgttccacagtttcttcaatcccatttcattttctttttcttccatcatatttaagcaaaattaaatttattatgttgtagttgaaaatgttaatagcacttgtctttgggtttgggatttggggcaatgtttttattcattatgttttgtctatgtttcttttttctacattgtatcatttttataataaaatataattaacactttaaaaataattgtacatatgtataacaaaatataatactataattttataaattaaaatttcatgtatacataaaattactttctattgtttttctctttttcatgtaggtcagggttactatggacaaaatgactcatttccacatggaacaatttgttgacctgaacacaatggtcagattagccatgaatttctaaactgttgacctcttccttggtgctgataaagataacgatcaggaaacagattcactttgagagatggaaagagtgggattactggggtaaaaatccccaagatgtgtgacctgactgcagaatggcattcaggagagctcagggagctcctggggagggcgggtggcactggcaccctgaggccatggctcagggtcaagatgggcagagggtccagcaacaccgggctgctgggaaaagagttttcaaataggttaaccgattaaacccatacttcagtcaccatattaaaaaatttcttaaatcacaaaaacatagcctataaagacagaaaacatgaagcatatagaaacatcaagctttgaatatgtcttcttgcttccctatttctaaaatgtttctcgaatgttttcttcagaggaaaatgtaattaatgacaaagtcactcctcagtacatccgagctccctgcaacaggcagccatgcccggccacttctgcaaaggcaccaaccaggagcagggtggccatctgcagaggtacccaggactgtggcatgggctttcctatgtgagacctggtgctggcccacattggagaaaaaactagtgccctccaggaaaccagtgcacccacaggcgggcagaggaggcatctgaatggacttcctgggggtaggcagggccatgccttccccaaaaaccatcatctcagggacgcagaaggcccccactgggcagatagatctcctgggtctactctccaggtgtgtggtgctgggaagctcttccatcacccctgccctggccatccacccatgcaaaggaaatgcagtaaggctgctttgagaattcatggagatattgagtgtgaggcacttggcacaatatctgatatgagaagcattcaatacccggtagctctccttaggagggggctgctccatccctaagccactcccacgaaagtatacgtcagtggaatcttaatggcctgagaccatctacacaactctgccacatgagaatgtgacaatgacagcctcttccccattctatatactcagggacaggaggagagatggctgagaagcatcctgcagggagaggagtcattccaagtttactagatgaccctgaataagaggccattgaacataacatgatcagatggaatgaatgtaacaaggggtcaagaggaagaattgagggggatgcagaaaatccaactgcaccccgggcactcagcggggaagagcacactcgctcaggacccagggcacattggctgcctagactgtgcgcttcctcaggccactccccaattgcagaggtccccggatgcctgagtgttgccaaacaataggagagtttaaaatattataaagtccatacttgtgccagctgctctacacaggtgatcttgcttagttaggttgagtatccctaatctgaaaattcaaaatccaaagtgctctaaaatctgaaattctttgaatgtcaccgtgatgctcaaaggaaaagctcattggatcatttcagatttcagaggaggctacttatcaatgactttggctttgctgaactagaatctgcaaataacttggtcctggctctttgcattattaaagtcatatccgtgaataatcacttgcttggattctgcaagaacaacactcaaaagtctgagtgaggaagagtggagggctctctccactctgacctccctgctcctggtgatccatccccaaaactgaattcccagggggcttccctacaaggaagtggctgtgtctgaatgaacatctgtgtgtccactggaccaaatcctcatctggtgtcactgagggtccacaaggaggtggttgggccttgagcccacaggaggactcccacacccttcctaatccaaggaacccaggaaaggcaccctgcctcagcctctgcacgggggcagttcagctggagctttccaccctgaaatcctacagtgctccctcaggccacaggggtcaagtccttgcagtcctgagcagtgttgtagggctgacaacttaccagaagggcaacaggacacagatagaagtcacctgtgctgggggtggcggtggggactgggactcccgcacactgcttggtatggcctcctggacagaaaagcaacactactgaagaacgtttcacaagtgtgtgcccttaatgcaacaattccacttcttgtctcaatcccagggaactactgagccacatgcacagagaggtctgaggggattttctgggggccatagtaacattccacatcttcacagggtctgtggttacacagatgtgtgtgctcttgtcaaaactcatcagatgacacacaagatttgtgcactgcaaaaagagaacttaataaatattgttccctagttaaagatatacgaactgaagggtttaggggtaaagtaccctgaggactgtaaaatattttgaatgcatccaaaaataagatgaattggtggagagaaagagagacagtgagaggaagacatgcatagagacaggataaagcaagcatggtcaagcattaattaaaaatccccacgatggaaacaggcgtgtacattgcacaatcctttccgcttggctgtaaagtttgaacattttaataatgaaaggttagaagaaaaacaaagaactaaataagaaaattatgtttggacacacacaaccagaagtcatggtacatcctgggtgacaagtgactgatgagagggacagaccaagcccttggactgcaggaagtcagaggggctggtcatcagggaaggcttccaggacaaggtgcccttcgagcagggctgcaaagggcaggtgggctcggcctttcaaggtgaggcagggcttgcagagtgcctatgccccacctggtcccacctctgcacagggtgcccagagcagggagtggcccctggagggcctcactgctccaggctggtccttagcccagcagaggcctctgccaggctggatatgaggcccagggctgaatgggggagtctgggctgcgtgcctccctccctgggctccttcctgggctccctggagtcctcatggcttcttggtagcagcctgctgagagggctcattctgttgcatttgggttccaggctcctgccttggcctttccctgctgtgactgtcaccttccatgtggggtggctttgtacaattggccaacagctgacaggtcagggccgtgactgccaggccacatgagcagaggcagagggccgagctggtgggcagagggcacctgtcacctcgactcggctgcctccagtgaggggtgacgactcacatcctcacctggggttgacagggctgctcagatgccacagcctgtgcatgtccaggggacatcatcagaggagcgcagctgtcacactgctgcacggctgagtggctttaaaccaggaacagcagaaagagaccccgagggggaggggagctctctctactccacccccatcctcagctctgcatgggggagaggcggggtcggggacagaccccaggaccaatcatggaagtgtcagcacagcccctatttctgggacctgccagctcgcagccctgtgccagtccctgcacagcccagtgccctgggactcacgacaggcctgacagcgtcctttctgttcatgtgaggcacctctggagctcactggaattggactattttctcctggtcatgtgcccgtggagagcagagctcagacatggaccatgtgtctgtccccacagcctactgccagggtgctctgcagtaaggaacacggatgccagagcccagctactggagggcctggtggtcttgctaagggcctcatgctgtacccctggagggaggatgcccagggctctattcctttgcagcagctgcagttgtacaaacgtcagccattcagagccccagcctacacagacagaactcaagacagacaggggtcatcacagaggccctcacagggctgtctccacacatgctgggaccctggctggcaagaggacattctctccacatcccagacagcagggatgggtgctgggttttatcctttggggccgaggagaaccaagggtgtttgtgtggatggctttttctggttacggaggtttccttttgttcccaggaacagaaggagatgttgacacccccacttcttgttcctcatccccctgagaaaattgcctggttcctatttcccgttttgttgatgtggtaaattacacagatatttcagctcctacgcctgcctgggattcctgagatgaaccctgactgctcccggcctatgggccgggttagctgctgtgcatgcccacaccacatacacacagatacaacacccacaccacaaacacactataccacacacaactagcacacatataccacagacacaacataaacatactgtaccagaaacatccatgatctaaacaccatatacataccacacacaccacacaccatacgtgatgcacaacacacactcacacagcacatacacacgcacaaacaccacatgcatccaaacgcaacttccacagcacacacaccatactgcgcacattcacacaccatatacccactatagccaacacacacatcacaaaacacaccacacacgccctatgcccactatagccaacacacacacatcacaaaacacaccacacacgccatatacccactatagccaacacacacacatcacaaaacacaccacacacgccatatacccgctatagccaacacacacacatcacaaaacacaccacacacgccatatacccgctatagccaacacacacacatcacaaaacacaccacacacgccatatacccgctatagccaacacacacacatcacaaaacacaccacacacgccctatgcccgctatagccaacacacacacatcacaaaacacaccacacacgccctatgcccgctatagccatcacacacacatcacaaaacacaccacacatgccctatgcccgctatagccaacacacacacatcacaaaacacaccacacacgccctatgcccgctatagccaacacacacacatcacaaaacacaccacacacgccctatgcccgctatagccaacacacacacatcacaaaacacaccacacacgccctatgcccgctatagccaacacacacacatcacaaaacacaccacacacgccatatacccactatagccaacatacacacatcacaaaacacaccacacacaccatataccacacatgcagcacatacccttcttactacagcggggcctcctcagtgctcacctcctgcacacatagtggaggctccacagacttcacctcaagacaccttgtgttccgatctggaatagagagcgaggtacaaaggggcagggagtgtgagcctcagggcacaggagccaggcccccaccacctctccaattggccccactcactctgtccactaggccatgctgttcagaaactccatgacccactgcaaacatgcggtccaggctgtgggcaattgttgttatcttcagagagggaacgtggcttggacccccacccaggaggtgaggatgcagcaggtcacaggctcaggggacagtgtcttgcccccatgctttgggggcagcagaatgtcaggctgtcagggccacagccttctctagccagcagcccactatcagggagtggggaactcttccgcccccgcttttggtgtggtgggatttctacaacacgctgtcagtcacttctgcagtggccatgggttggcccaaatcacttgggggcaagttagatgactgtccttgtggtggccctgggaaagccgcctgggatgcctttctccactcagctccagagtggtgcctggttactagttcagaatgacctggcctatcttataatcagccacacccagggtgtaaacggtggcccccaggctcccagcctttcagcctaagggaaagaaggcattgagcattagtcatcaaaataggtggagcaaaatgctggtaactgtgaacccagctggcttctttgagagtctcctgaaatgcatttgaaggtattgagtattagtcatcaaaatgggtggagcaaaatactggtaactatgaacctgactggcttctttgagagtgtcctgaaatgcatttggcacctgtgctccactggtcatagcaataatcgtgctggtaaccttgttgtctgcagaagaagcaaggagtgacctgctcagcaaaggcatcaggagtgacctccagaagctccgggacccctgcagttggctgggcccgcagcactgctcattccaaggcatggccaggtgcccccacctcatcctccaggggagaggctgccaagacccaagcacctgccacccagagacccctagagtgatgcggggcctcagcctggtacccattttacagaggagggatggagaggggcagggcccttcccatcactctgcctgaaccctcacccactagcagcctgcaccacttctgcctgagggcagctccagccagagctccacaagcacaggcctgtcccacaggcagggggaggagcagccgggcagtcccatgggcagagcctgcgggcagccctgccaacatctttgggcccaggagttcaggactccaggtcagtggcacctgggcaggggatcccatggccacctcaatgcctttccccacgagccccgcctcttcctgacaagacctgcagccccacagtggggaagggagtcgggggctgtggacagccttctgtaccatctgagacacgatcaggtgatgaaagtcgcttgaaggggacacgaggaagggaggaggaagactaaggtgtgtgcaagggggcaaaccccttggctcttctcttccttttcacacagcccagctggagggcaagcaccaaagggttatgagcaccagaactgcacacgcaggatcccacacagttctcagaactccatggaacgggggattactatgctcattgcacctgggagggcacctggagctcggagcaggtgagcaacttgctccaagaagcagggcaggaatctgcacacagagctctctgaggcccattcccagctctgttcaccctatgggaccaccatggggatagcaggagggcttacctctggagttgacacattgaatctactaatttgcttgtaaggaaatgaagatgttctaagaatgcacagtgaggcgaccccagtaataccctaagagcatgaggaactagaacacattctgtgagctctagtggtctgtaccattttacctccttcctgcatgaatgtgtgtccatgagactcaagatcctctgttaaggtaagatgttcatggattgtttttctgagaaaaataaaaaaaaaaaaaagattgaggtggagagggatggaatgttacaaaacagctcccgagctctcctggagccattgtctactgtgaagacctccctgaatggaggagggtgccaggcacataccttatcatgctcattcatcgctgtgactttgactagagatatttttgttttctctgtctctgatctggtaagcatagtgggagggagggtgtggggttaggggctgcttagctggtaccctgggtatagcctcgctttccctgagctcatgcctgtctcagggcacttagactttggagagctcataaaggcccagcatgaaccctccatggtgaaatgggagcatcccatagatgtgtgactacaaatcaggcccttccaatgggaccagctttcttaaccctaacccctaacccttaacccctaacccctaaccctaaccctaatccaaaggcatgcaactgagattcagggacaggcaatgggactggcattcctaatcttaactctaatcctaatcctaaacctaaccctaagggcttcccttgtgttgggcaacgtatccttcaaaaggcagggctgagttcggaaaaggcatcctgctaagcccccagccctgcacccagcacccacaactccagacccctgaccctgactcaatctcctccactctctttatcctaccaaagtagcaaatctgcttaataagagtgctatggctccttgacttcctgtgctcccgaaaccaaaagaccaaaggctgaaagaagcggccccaaagggtgtgcaggcagctgagcacggcaggctggctcggggatgtggcctgtcagcctctgttaaagcagacaggactggttgggccaggcagagctggctctgatggcaggactgggacaggctaatccaatgtgacaggctgagccagcacagcaaggctgggccaagcatggaccctgaaggctggcttcgcactgcaggaagagagtccctgccatgtgggggagctctgagagcctcagcccaggagggaaggaggccaggccctgcccagcccctgctgcccctctgggccaccacccagagtccttccccgtgaacttgctttcttcgccctcatgcccacctaggtctccctctcccaaacccacagcacattatgcacaaactcaagccttcccccagctcagggagcagaagccccgtcccagctcttcctcaaagctgtaagtggggcccaggcccccatccagtcctcaggatcctcggctctcttctgtgcttcaccctcttagtgcccagttccaggcatttgcatcagaagtgttcttacctcctgccaatcaggagctctgcagtgcctcctgctgggcctgggcacccctctaggccaactccagctgcctgagcttgctcctcctgccttcctccagctccccagcctggcctggggctcaggaccccacccatggtctcccctgtctgagacccaccaggggaccaagctcttctgcactaaactctccagcactcccccttaccctgaccctgtctccctcccatagagaaggccagagcagagaggggcacacagagagcagcagccagcacaggcaggtgttcacaggacacacacacctgcccaccagcccccgcactctggggaaggaggtagggcagagggaggacaggggacagagaaggtcagggaggccaagaaattcgggagcacaggggctacaggtaacagtgcaaccaggggtcagagggttcaggggaacaggcattggggtcagggtgggtactgtgagatgccctgagcagcctgccctgtgtgctgtcaggctcccaaccaaggtctcagggagccccacagctctctggagctccctctggcccagcctctcaggcctccgttgggggctcaaagcagcactcccctgcctggggtgaatgtgagctgtgggacgatgctgccctccgtggagtaggtgatgaaagacagctacattctcaggctggggaggaagcacatggccctgagaagccagaggcactggctgcactggacccaagcatagccagggcggtgaggcccactccccacctcccaccccaactcttccatcttggggccccttgctggacacagggaagtgagataaatgcagtggactctgaggcctgtggagacgagggatccacaaaagaaagtcaggatggcaacttgctgcatccccacaatcccaacacaccccaaagaaactcaaactcacacacaccacgtacacatacacacacatgcacgcacacacatgcgcaaacatgcatgcataccacacacacagtcacacatggacacacacacacaccccccatgctgaacaagtagggagatgcacacacagccctcccagctggcctcccttctactggaaaattctttgcctcttcaccccattccctcctccccctcctctccctcattcctccttcatcccagaggagtgactcatcctattggcagccatgcacacagccttcctttcctctccctgaccctccttcctgccggctggccctcagtggccctcagcgacagtgctgccatacatccccagcggagctccccatggatcctgcccttgttgcccattcattttacccacagtcatcagacttttcttccttaagtgccaccttgatcatcccactcctctgctcaagagccttctctggctgtctatggctcacagcaggaaatctcagctccttggcctggcataatgagcccctgtggctttggcctcaaactgaccttcccagccctctcccagccctgcctgagctaacctcattagctcagcaagctaagccaagcaagaccactcactccaccacaggtcccctgtggtgggaaatatttcaagttttgcagggaaaatgtgaggcttgtgaattaagtgttttgtcttttccatcctgcaagacccagttcaaagacccacatccctggaagccactcttgactttgtcgttaggagttcctgctttttcctttaaccttccatgtgagttctttgtccctttccttgaaccctcggcagtgcataacccagggttccgggactgagtcactgatttacctacctaatgtcccttcccagcctgcgatgtccccaagggcaaacttggggctcaagtattcccagggctcacaggcaggagccagccaaggctgccgagatccaatggaaccagtgagcgctggcctcattcctgtttcagaatgccactttgtgctctgtgtcccccaccgaggaactcccacgcccacccaatctgatgggttgtgctttctacctgccagaggaaaagcttcctgcagtgcagggaaggctgcagcctcactttacttatttctctgcaatctcttctgtattgcagagccataaaggtcaaggcaggaatccaggctgctgggcctgaaaacaaaggagacctgtgttagggagttgaggcgcatctgtctggtgggcaggtgtctgtccactccagcctcctagcagtctcttaacaagctcccccgaccccagcagagctttggctggggtacacccccagcaaccacagtggatcatctgggtggtgactttcattagggtgaccacccagacctgtctgtctgggaccaacaggctttcagggatgaggtacattttttgctaatagttgactattaccatagtcagctgactaggaggatagctgactggttaccttagctgggggccgtgtagataagaactgtgggaggatgtcccagctgaaaagccctgagcaattctgatatgctggctctccttgctcccacttacccggggggtttatccatccccaaccatctgtgattggatagggcagagctcttgggaatcacggtccatcagacgccccttgagaacaacagacccagacctggtccatcattcctctgttggactcttggattcttggacatcagaccggacccttcggttggggatccttctggcagcctgtgtgtgacctgctaaccctattcatgacacctccagatcctgctcactgtcccacatttcccagcacccacagagggaggtagtgacattccctgtgggagcctgggcctcaggcaagggaggatgtgcactttgggccattttgcctcccatatttcttataagcttgcaaagccaagccgctctgggcatggagagccttctccagcagacaccactggggagggaagaagcacacctggccactgctgtcctggcgtcatcatttccccagcatcagggagagccacatgcccttattgtcctgacttccagatcttactgctaatattctcccacttagtccccagacacagagtaaggagcttgaagggggttggagccttgtgagacttccatctaggtggggatcaatcacatctgccctacccgcccaagacgcaaaggtctttgcaatcccacagctccatcggtaggtacagcttggcagaaatgggaaatatttcaagttttgcagggaaaatgtgaggcctgtgaattaagtgttttgtccaaggtcctggagatggtatcagttaaaactaaggctggtgccctcatctgagtcctttctctgtatctgtgttgctttatggtcttttgtgtattatgtactcaggggagcctaccaggaggctcttctcccctccagcaatgaccatgtctataaatgtttgcctcctgaacatcatgcttgtatgtggtagttctcatgcatccaagagcagccttctcccctccactgttccactgcctcctctagcctgcatctaaatctgcatactgtattattttcattttacagatgaaaaacttgaggctctgaacggtcaagcaatttgtcacaatttccatagctgtgaggcgcgtctgtctggtaggcagatgtctgttcttcctcacctactccactgggactggggtcaggggggctactgaccccaccatggaggatccaggcagggcccttcataagctctccaaagcctgagtgccctgagacaagcatgagctcagagaaagcctggccatacccagggtaccagctaagcagcccctagccccacagcctccctcccactgtgctcaccaagtgtgggatctgcactcacagcttgctgaggcccacacccagaggcagatgcaccaacagaggcaggtagtgacattcccttgtgggaacctggtcctcccttgcctgaggatcaagctccacagggaatgtcactgcctgcctccattggggcaaaagtaactacagtttcagactgtgaattttaaatcattataactaggctcaaagacatctttattaatcaaaacggaaaccattacaatcaacacatttttgccaatgagaaacaaatttgtttattcctgcagtgtaaaaatccatgctttgggattggacaaactcttggaaagcattttctgcatcctgctggttgtgaaatgattttccctgcaaaaagttgtcgagatgctcgaataagtggtagttggttggcaagaagtcaggtgaatatggcggatgaggcaaaactctgtagtccaattccttcaactttggaagagttggttgtgtgatgtgcagtccagcattgtcatggagaattgggccctttctgttgatcaatgccagctgcaggcattgcagtttttggtgcatctcaaccatgtgctgagcgtacttcttagatgtagcggttttgccagaattcagaaagctatagtgtatcagaccagcagcagaccaccaaaccatgaccatgacctttttctggtacaagtttgcctttggaaagtgctttggagcttattcttggtccagccactgaggtagtcatcactggttgtcatatgaattccactttttgtcacacgtcacaagcggattgagaaatgattcattattgtgtagaataaaagaagacgacacttcaaaatgacaattttttaaatttttgctcagctcatgaggcacccacttattgaactttttcaccattccaatttgcttcaaatgccaaatgactgcagaacagttgacgctgaattcttttgcaacttatcgcgtcattgtaagaagatcagctttgataactgctctcggttgttgtcaacttccaatggccagtctctatgttcctcatcttcaagcctcttgtctcctttgcaaaatttcttgaaccaccactacactgtacattccttagaagttccagggccaaatgcattgctgatgttgcaagttgtcttggctgctttatgacccaatttgaactcaaataagaaaatcacccgaattcgctttttgtctaacatcagctccacagtctaaaataaatataaaataaacagcaagtaataagtcattagcaaaaaacataaagtgagaaatgcacattaaaatgatatataacataaccatatttatttaagaatgtattccaatatcaaacagcaaattttaaaatgcaaaaatcagaatttcttttgcaccaacctaatagcatggatctgaacccaggtctagctgcaaaaccataatttacccattgcacttagggtgtctaggtgacactgtggtatcaaacgatactggaaaacaaagcactggactctcaaaactcatccacaacacagactttgcccttggcagctcccacactaacatgtaagacaacccctttcctaactaatgataacagtttccaatttccttctctttacactctactctctttttccttcagcaaaaagggtcttccagtgaagggttatggggagcaagaatcttcattccattcacccactctggtaaaatttccagtttgagatgattttgaagaagggtctacattttagaccacagaggaagccagtgctcttgggtggtgaagggccacatgaactgacatgtccccagaaggaggagaaggaggcaacatggaagagtgcaaactatgtgggcttctggcacacagagctctacttatgatttagtgccccagtcttacatgagaacagagagaccaggatcaccaaacatttgagaacacctctaccattacaatttgagaccaaaacatcatagtgatataaccacattgcagaaatggaagtgggtaggattgaatcctgtaggaaaactcagctatgagaaagctaaatactcttcccccataggaagaagtcaacagagaatatgtaagctgacaacagcaagaaacagcagtcagtacaagcatatttttaaaaacaaggacataaaaccagaagaaaaagctaaaacacttgcaagtggctgcttctggggagtgagatcagaagtgggaaagagtcgagcaggagccttgggttttttgtgtgtgtgtgtgagccttcatagagtatttgatatttacatttatcttcaagcttttcattaattaatgtaaaaatgaaattacaagcaaaaactagcagcatggaatgatgtcatcaaaatggtggcttaaacactccaagcccctgctcccccatagaaacattgaaagaaaaaaacagaatctgtgtgtgccaacttttcagggactcaggcaaacagtaatcaaagatttactgcaatataccaggtgcccaactgagaaaaagctaccttcaaaatcacaggaaagttttgtgatgtttttgtgggggaaaggaagacagatcagactgttattgtgtctatgtagaaaaaggaagacataagaaactccattttgatctgtactaagaaaaattgttctgctttgagatgctgttaatctgcaaccttagccccaaccctgtgctcacagaaacatgtgctgtattgaatcaagatttaatggagttagggctgtgcaggttgtgccttgttaacaatttgtttgcaggctgtatgcttggtaaaagtcattgccattctccattctcaattaaccagggacacaatgcactgtggaaatctgcagggacctctgcccaagaaagcctgggtattgtccaggtctcccccccactgacacagcccaagatacggcctcgtgggaagggaaagaccttacagtcccctagcccgacactcgtaaagggtctgtgctgaggagaattagtgaaagaggaaggcctctttgcagttgagataaaaactctcctgtttgtccctgggaatgaaatgtctcggtgtaaagcccgaccatatattctatttactgaggtaggagaaaactgccctatggctggaggtgagacatgctggcagcaatactgccctgctactctttactgcactgagatgtttgtgtaaagttaaacataaatctggcctacatgcatatccaggcacagtaactttccttaaacttatttatgacacagattcctttgctcatatgttttcctactgaccctctccccaccattaccctatagtcctgccacatctccctcaccgagatagtaaagatagtgatcaataaatactgaggaaactcagagaccggtgctggtgcaggtcctcacttgctgaacacttgtcccctgggcccacttttcttcctctatactttgtctctgtgccttatttcttttctcagtctctcatctcctccttgtgagaaataccctcaggtgtggaggggcaggcccccttcacttttcacatatcctttctgcaacactttcacagcatattggcagttttggtcttgagcagtgacccagttccaagtgattgtctatgaactagagggagcagcgtagctcttacttgcacatttctgtgtatatctgttctaacctggctggaggacacccaaaagactagctccctctactctatctcatatagctcagtcagaacacatctagaaaatgtggtaagcacttcttgtaaaagtgatgacaaatctacaggggacaaaaagccccatagatgcctgaggcaagagagtttgggtgaatacacaatagaccatcaaaggcccccaggagaagctaggtgtgactctttgggaactaggatgtttaggataagctgtgtacacaggggaatttagaaagtcatggacatgcccaggcaagatatgtgctcagagaagtccacactttaagctttccatagacttagagcaagtctagttaagttgtgaaggagtgcccagaacaaaaccaatctgcaaagacaggaatgtggctgctctttctgttaaattttttagtggttttccttttgtcttagctcctggcattcaaagaaatctgtcaaaacatcacctgaacatgaactacagaaggaaaaatttcagtgatcctacacaaccaggaatggcctttgtaaaaatagtctgaaaaattttcaaaatgaacaaactactacaggattttacaattaaaaaacaaaaaacaaaaacaaaaataatccattaacttatggggaagtggggggggatataatttatagagttactacattataataatcaaacacccaactttcaacaacaacaaaaacaaaataaaaaacacaagacttaaaaagaaacagaaaaacatagctcattcaaaggaactaaataaatggacaaaaactgcccccaaagaagccaatattttagacatactggacaaagacttaaaatatctatcttagatatgctcaaagaggtgaggaaaaacaagaagaaagaaataaagaggcttggcatggtggctcacacctataatcaatcaagatgggagaatcgttaattgcaggagtttgagatcaccctgggcaacatagtgaggtccatctctaattaaaataaataaataactgggtttggtggtgcatccctctagccccagctacttgggaggctgaggtgggaggattgcttgagcctgggaggttgaggctgcagtgaaccatgatcatgccactgcatttcagcctgggagacagaatgagactttctctgaacaagcaaacaaacaaaaaagaaagaaaagagaaataaaggaaatcaggaattactgatttgtttaaagaactgaaataaaaaagctattaacaaagaattccatgttctgcaatactgtcttctaaaaataaggaatatatttgaggcattaacaaataaaagccgagggacttcattaccacttgtcttataagaaatgctaaagggaatctttcaggtgaaaattcaagggcactagacaatagctggaagccatatgaacataggtttctggtaaaaataaatacatgagaaaatataaaagtcagtaatattgtaatctcggcttgtatctctattatttttctatagaatttaaaaggcaaatgcacaaaaatcattataaatctgttattgggcacacaaaaccttgataaagaggggcacaaagctgtacaggggcacaaagctatactcaactctgctgtttacaattaaagttaagttaaagttgatagcaactcaaattagatagttataactttaggatgttacatgtaatcacacgtaataaaaaaggaaatatctataatatgatataatacaatatacacaaaaggaaataagcaaggtatcaaaatgtgtcattgcaaaaaattacctaaacacaactgaagacagaaatggagaaaatgaggaacaaaaaatctagaagatatacagagaacgaatataaaatgacataagtaagttcttccctatcagtaattcatgctccatctacatgctgtcaagagactcatttcagatctaaaagcacaaatatgttgaaaattaaaggatggaaaaagacattacatgcaaatgaagaccaaaagggagtgaggatgctcacagtaatattagacaaaatggaatttaagttaaaagatactggcataagagacaaagaaagactgatattaataaaagggtcaattcactaagaagataaaacaactataaacagatatgtaccaaaaatcagagctatgaaatttattaaacaaacattgacagaattaaagggagaaataggaagacttacgttaatagctggagacttcagtaccctactttaatcaggtatagaatcagacagaatgtaagaaaagatagaaacaagaaaatagaggacttgaacatctcttttaactgagtgtacctaacacacatatacaaaaccctctgctcaaagatagcagaatacatgtttttctcaagtgcacatgggatattctccaggatagatcacatgttaggccacaaaacaagtcttaaaaaatctagaaagttttaaatcatacagaacactttttccaatcacaatgtaataaactagaaatcaataccagagggaaaactaaaaaattcaccaatatgtggaaattaaacaaaatgctctcaaataaacaataggacaaagaagaaatcacaaagaatattagaaaatacaaatgtttcttggcatacaattggggtatatcccattaaacccactgctaattcgaaaagtcattaatggaacaatcataagttagggacagtctgtaccttgagattaatgactatgaaaacacaacatactaaaacttatgagatgcaaggaaagcagtgctaagagggtaatttataactctaaatgaataagttagaaaagctcttcaatcaataaactgactttacatcttatgtaactagaaaaccaaaagaaaattatacccaaaaatagcaaaggaaaaaaaaagattacagcagagataaatgaaaaagagaacagaaaaatagagaatatcaatgaaaccaaaagtttgtgtgtttttttttttggaaaaatcaacaaaattgacaaacttctttcttggatgacttagaataaaagaaggattactcaaattactaaaatcagaaaatgagagtgggactatgactaccaatttaacagaaataaaaaagattataagcacataaaatgaacatctgtacaccaacaagtggaattaaatagataaaatgttttttatgaatttgggtgttcttaagaatctgggtgctcatgaagaatattttgctctttatgaatctgggtgctcataaagaatatgatttgattttgatagactgtgtgtttctaggaattatcccatttcatctatttaattctatttgttggtgttcagatgttcctagtatgtcattataaaatttttcattactgttaaactggtagtcattttcccactctcattttcccactctcattttcagaaataagactgcacacctacaaccatctgatcttcaacaaaactgtcaaaaacaagcaaaggggaataaattccctatttaataaacattgctgggatagctggctaaccatatgcagaaaattgaaactggacccctttcttacaccttatacaaaaattaatcaagatggattaaatacttaaatgtaaaacccaaaactctagaagaaaatctaggcaataccacttggacataggcacgggcaaagatttcatgatgaaaacatcaaaaataattgcaacagaagaaacacttgacaaaagaagctatcatcagagtgaacagacaacctgcagaatgggagaaaatttttgcaatctatccatctgacaaaggttaaatatccagagtccacaaggaacttaaacaaatttacaagaaaaaaacaaccccattaaaaagtgggcaaaggacatgaacagacacttctcaagagaagacattcatgcagccaacaaacatatgaaaaaaagctcaacatcactgatcattagagaaatgcaaatcgaaaccacagtgagatactatctcatgccagtcagaatggcaattatttaaaagtcaaaaaacaacagatgctggtgacgttgcagagaaaaagaaatgtttttacactgttgatgggagtgtaaattagttcaaccattgtggaaggcagtgtggtgatacctcaaagacctaaaggcagaaataccatttgacccagcaataccgttactgactgtatgcccaaaggtatataaatcattctactttaaagatacatgcatgtgtatgttcattgcagcactattcacaataacaaaggcatgaaatcatcctaaatgcttatcaacgatagactggaaaaagaaaatgtggtacatatacaccatggaataatatgttgccataaaaacgaatgagatcatgtcctttgcagggacatggatggaattggaagctattatccttagcaaactaatgcaggaacagaaaactaaacaccacatgttctcactcataagtgggagctgaatgataagaacacatggacacatgagggtgaacaacacacactggggcgtgttggagggagagcatcaggaagaatagctcatggatgctggggttactacctaggtgttgggatgatctgtgcagcaaactaccacggcatacgtttacctatgtaacaaacctgcacatcctgcatgtgtaccccggaacttaaaataaaagttgatgaaaaataaaaaaatttaaaaaattgtgaagaaatagaaaatccgaacagacctataatagtaaggagattgaattagttataaaaacctctcaacaaagaaaagtccaggaccagatggcttcattggtaaattctgccaaatatgtaaggaaaaatcctttgcaaactcttccaaaaatctgtaggtgatggaacacttctaaacgaaatctataaaggccagcactgcactgatacaaaagccagacaaagacactgtaagaaaactatacaccaaaatcccttatcaatattagtgcaaaaatcctcaacaaaatactgcaaactgaattccacagtttattaaaagatttttatatccccaaagaatgagatttatttccataatttaaaaatgattcaacattaaaaaatcagtattatacacttcattagtagaattaagacaactacatgatctccattgataaagtatttgataacattcaatacctgttttgattaagacactcaaattaaaaataaagttcttcaacatgaaaaaggacatatacgaaaacacacagctaaaatactcaatgctgaaagataaaaaatgtttcccctaagatcaagagcaatacaaggatgtccattttcattgtgtccattcaacatagtatggaaattcaagccagagcaattaggcaggaaataaaaataaaaggcatccaaattgcaaagaagaggcaaaattgtccctatttatgaatgatatgatcttacttgtaaaaaccctaaagattccacaaaaaactgttagagctaataaataaatttagtaaagtagcaagatacaaaattggcctgcaaaaattagctgcatttctatagactaacaataaaaaataaagtgaaattaagataacacttctatttacaatagcacctcacaaataaaatgcttaggaataaattaagtgaaggaggcaaaaataggtttactgagaaccacgaaacattgttaaaagagtttaaagatagaattaaattgaaagacattttatgtttaaagattagaaggcttaatattgttagactgacaatactagccaaagacatctacagatttagtgtaatctttaccaaaatctcaacagcatttttgttgcagacatagaaaaatccaggtaaaattcacatggaatctcaagagatgacaaatactatcccttagcccctcaaaaaatcttcaaaaggagaaagtagagtaattgtgttttctgatttcaatatctattacaaagctacagcaatcaaaacaatgtggtaccggtttaaggacaggtatatagaccaatgaacagtatagaaagcatagaaataaacctttatgtatatggttgattgatttttaaaaaatgttgccaagactatctaatctggaaaaggacagtagtttcaacaaatggtgctgtaaaaactgcatgtccacatgcaaaagaatgaaattgggcccttactatacgccattacagaaattaacccaaaatgaatcaaaatctaaatatatgagataaaactacaaaaatcttagtagagaacataggaaaacacctttatgacattggatttgataataattttttggatgtgacaccaaaagcacagataacgaaacaaaaaagtcaaaaactgaactttgtccatgccaattacatttttatgcatcaaaggagagtatcaagaaagtgaaaagacagtccacagaatggaaaagaacatttgcaaattaagtatctgataagagattaatatccataatatataaagaactcctacatatcaacaacaaaaatcaaacaagtccaacaaaaattaagcaaaagacttaagtagacatttctccaaagaagatacacaaatgtccaataagcatgtgaaaagaggctcaacatcactagtcattagggaaatgccaatgaaaaccacaatgagatacaacttcacatccattgggatggctattatcaaaaaagagaaaatagcaagtgttggagagactgtagaaatattggacctattgtgcattgttgctaggagcgtaaaatggtgcatccactgtggtagacagcttggcagttcctcagaaagttaaacatagaattaccatatgttccatgaattccacttgtaaatatgtatatacccaaaagaagtgacagcagaaactcaaacagatatgtgtttgccagtattcatagcagcattattcacaatagcctgatggtagaagtaacccaagtgttcatcaacacatgaatgggcaaacaaaaagtggtacatatacatgcggagaaatattattcagccatagaaacggatgaaatttcatagatggcataacatggatatacctttaaaaccttttgctaagtgaaataggtcagatagaaaaagtcaaatattgcatgtttgtgtgaatatattgtataattccacttacgtgagatacctgtggtggacatttcatacatacgggaaagagaatagagattaccagggtttggaagagggagaaatgggtagtaattgttcagtgaatagagactttcagtatgcgaggatgagaaaattctggagatgcatggtgatcgtgatgggtgcaaaactgtgaatgtacttaatgtcaaggaattgtacacttaaaactagttaaaatggtcaatttaatgttgtatatattttatcacaattaataacttaaaaaacctaatagcatggattgtggatcaggtagacacaagttataagatccaagtttgaatctgctgaatgtctagggcatgctacttaacctctctgagccagtttcctcctctccccagggctaaacatcgtctccacccctacttcatggctggtggtaaagataagcgggaaatgtgggctggtacaggggaccccacagcacaggcctccagtgcacggtcactaggtcagcctgaaatcagaggccaggctgaaggaagtgagcaaggaagccagtaggtgaggaaggcgtggagactgaggacttgtcagcctggagcaggaaacattcctggggaacacaacagtattaagcaggaaaacaaaatgaaacaaaaaggaaatttcccgcattaataagaggacaatgaagcctatttattctatgatgaaggcccattttattacactcacaggttctgaggatcaggcactcagggcagagtggggagggctccacatgtctggagaccctgatgggaaggcttgagcagccggacatgacttgaaggattggatactgggatttctggaggatcctccattcataagtgtgggttctggcaggaggactcaaaagctgggctcagctggaactgtgaatggagactctgcatgtggcctccctgtatgacctgggcttcctctcagcatggtggcttaaaggtgcttgggctttaacaggtggcttagagttccaagagtaagtattttcagtgagcaagtcagaaattgtagagccttttatggcatcaccttgggaatcacacagtgtcacttccactgtactctattaatccaagcagtcaatgggataccaagagtcagtgggagggaacacaggccccagctctagggcaggagtgtgaatgagttcacatcccagtgtcaaaactgctgtatgaccagggctttgaatggcagagagggtatagtgtgtggaaaaacatgggcacaaccaagtgggattcaagcgtgattcagaagtcagagtgttactgtaaaacatttgtagaaataccttaatcaattttattttctccatttttgtatgcacaagagtggcatataattttagaaaatttctaccaagtgtatatgttctggctatgtgttcctacccaaatctcatcttgaattataattcaaattgtaacccccatgtgttggggcaaggacctcattggaggtggttgaatcatgggggtgatatgctgttctcatgatagtgagtgaattctcatgagatctgatggttttgtgaggggctttccccccttcgttctgcatttctctcattcttctccttcctgccatcatgtgaagaaggacgtgtttgcctccccttttgccatgactgtacgtttcctgaggcctccccagccatgctgaactgtgagtcaattaaatctctctttcctttataaattgcccagtcttgagcagttctttacagcggcatgagaatggactaatgcaataaattgttatcaggtagtggggtgctgctgtaaagatatcaaaaaatgtggaagtgactttggaactgggtaacaggcagaggttggaacagtttggagggctaacaagcagacaggcaggatgatgtgggaaggtttggaacttcctagagacttgttgaatggctttgaccaaaatgctgatagtgatatgtacaatgaagtccaggctgaggtggtctcagatggagataagtaacttgttgggaactaggataaaggtgcttcttgctatgttttaacaaagaggctgatggcattttgcccctgccctggaagtctgtggaactttgaacttgagagagatgatttagggtatctggtggaagaaatttctaagcaacaaagggttcaagaggaagcagagcataaaagtttagaaaatttgcagcctgaagatgtgatagaaatgcaaaacccattttctgggggaaattcaagcctgctgcagaaatttgcataaataatgaagagatgaatgttaatcatcatgacaatggggaaaatgtctccaggtcatctcagagacctacagcagctcctcccatcacaggcccagagacctaggaggtaaaaatggtttcgtgggccaggctcattggccctcatctcctctatgcagccttggaacatagtgccctgcgtctcagttgcttcagctcctgccgtggctaaaaggggccaaggtacaacttgggccattgtttcagagggttcaagccccaagccttggaagcttgcacatggtgttgggcctgtgggtgcacagaagtcaagaattgaggtttggggccaggtgtggtggctcacgccagtaatcccagcactttgggaggccaaggccagcggatctcctgaggccaggaattcaagaccagcctggccaacatggtgaaactctgtctgtactaaaaatacaaaaattagcctggcatggtggcaggtgcctgtaatcccagctacctgggaggctgaagtggagaatcacttaaacccaggaggtggaggtcacagtgagccgagatcatgccactgcactccagcctgggcaacagagtgggactccatgtcaggaaagaaaaaaaaaaaaagaattgaggttgggaaatctctgcctagatttccgaggatgtgtggaaacacctagatgaccaggcagaagttgctgcaagggcaggcccctgatggagaacctctgttagggcagtgcagaagggaaatgtggggctggagctcccacacagagtccccacttgggcactgcctagtggagctgtgagaagaggacaactgcccttcaaatccaagaatggtagatccaccgacaacttgcaccttgtgcctggaaaagccacaggcactcaaaggcagcccaagaaagcagctgggagggggtctgtaccctgtaaagtcacagggccagagctgcccaaggccgtgggagtccacatcttgcaccagcatgacctgggtgtgagacatggagtcaaaggaggtcattttggaactttaaggtttaatgactgccctattgggtttcaaacttgcatggggcctgtagtccctttgttttggtcaatttctcccatttggaatgggtgtatttacacaatgcctgtacttgcattatatctaggaaataactttcttttgattttacaggttcatgggtggaaaggacttgccttgtctcagatgagactttgaacttggacttttgggttaatgatggaattagttaagacgttggcagactgttcgaaaggcatgattgtgttttgaaatatgaggacatgagatttgagaaggaccaggggtggaataatatggcctgcctctgtttccccacccaaatctcatcttgaattatagtccttattgtaatgcccatatgtagggggagggacttactgggaggtgattgaatcatggcggtggttgccctgtgctgttctcatgatagtgagtgagttctcaggcaatctaatgggtttgtgaggggcttttacccccttcactctgcacttctctcattcttctccttccagccaccctgtgaagaaggacctgttttgcttccacttccaccatgattgtaagtttcccgaggcctctgcatccatgctgaactgtgagtcaattaaacctctttcctttataaattacccagtctcaggcaattctttatagcagtgtgagaatggattaatacagtctaaaatagatctttctttatataacttaaaaattacaagtgatgaaaagcatttgagttggttggttgtcagttttttccccctcttttggagctgtatttagtataatagaatatcttaaattagtggtcttttataataaatgaaattgggtgtacttcgccccagcatattagggttcccttgcttcatgccttccatgacagttggtattattatattttaacatttatgcctaatgattaaacatctccttgtggtcttaatttgcattttctaattactctagagacttcgtcctttcacatgattttggtcgttagtggttcctctttgaagtgcctattcatgtctgtgtccattcgttgctttgggtgttcctctctttcacactaattcattaaaagtatatatcctggatactaatcctttatcaattgctgcaagtatcttctttcagtgtgtggcttgctttttcactccgtttgttgttttttaatcaaagtataagttcttaattttaacgcactttaactgtcattttccaccatggcccgagtcgcggagtccgccttcctggcagagcgttgcgtggtcacagctgaggtctggggagcagaggcggcgggcgctcccggggggagctgggcgattccggcggggggaggtgccgatcgagcggccgccaggctgctgggggaaggagggccaggaggccgtgggggtcctcggcgcagactggagccgcaggcaccgcgcgcagccctcgcccgcatcgccgaggccccgcgggcccaggagcgagaggtcgggcgcccaggaccagagggcgtaggcgagagcaggcaccgcctccaaagaacgccctcgccctcccgcaggcgatggcgcccggccctgaccaagccagctgggggcatctccgcggagctgagccggggaagggccgggcagcccagagggtcagaagggggttttctcccggggttgtgagttctttggccagcggcaccctcccctgccggggccgcccacccgcaagccccgccccgaaggctggagcttccctgggggtgggcgacgccgagaccacgccccgaaggcgggagcggcttgggggcgggatctggccgccctcagggctccggcgccaagttcagagccacgcgcagtgctcttggccgggaggaggctgtgctgcaccagcacctcttgctccacatctccagagagcccaggtgaggcgcaccctcctgtctgcagggacagagccgcgagcgggcgcgggcggcggggtccatctcacttccacatcagcctttccccaggacagggttgttgagtcctgcctttgactgtggggtcctttccttcccaatgtcgccagcttcctctctctcccacgtcgtctccgagtcccatccccgtttctgttccctttctcttctctcactttttctcctctatctcttctttattgtcttcctgttttcattttcttctgtgtcagtctctctccctctctcttttcctctctttgtttattcttctcccctaccttctccctctcccccctgttttttcagcactcaagaattctgcctatgaatttttctcctagggtgactttcaggctgcagttgttttcctccctcccactgtctctcccggggtttatcctgtgttgctgttattctcagcccgggcttgcgctgggcagtagggtaagaaccatgcatcagccccagatcctttctccaacagattatatccaaagatctggacatgtatcctgttcactgcctttcctgggaaacaaaacaataccaaatgatcacattataatgagtttttagaatgagctaaaagaacatacctggttttagagacaaggggttgattgaatcctttccttgacattttgcctttactaatagacacagacagcacagcaggaagctaagccttgcagaagcatttagggggcgttcccacccacacctgccttctgggcaggctatgcaatgccaggtgcaggggagggaggggacaggattcagagcagggttgtaggaagacagtgggaggccagggctttgaaacatttgagggagcctggaaataagaaattaacagtaaatttctaaaatatgtagttgccaatgccactgatgtacagaaatgaaattaattactcctgagggagacattagacattttatggcagtaattatggcatttgaaagtaatgattttatgtacattagataggagggccaaggggaaaatatttcctgttagtatcaaagattgtcgtagatgcataagggacgaactctagaaaatcaagtctcattctttttgagggataaaatagaactatatcgaggcaattttttgtttcttggttacaatgtaatcttatcagagatatgtgatttagtttttaatgatattttatgacacatacatatttatatgttcaaacacacacaaatacataatatatatgcactaagttataaaagagcccttgtttgtttgtaaagatcttaattaccaataaaggttgaagctttcacttcttggaaataagttaacatgatattgtagtttattatgacctttaatgaaaattcaactaatttacttttgattgatacagaaatggaaatttggccgtagataaatcacacagaattaaacagaaattaagtatgatgaaggtgcattgcagtgtgttcagtgaaagaatttgcatatgctagatattttggacaaattcataggtatgtgcatggaactgtgatttgtgaggcttttttctggtttaaaaagttaaattgcctttatatctaatccctgatccccaacatatgcggattctggggggagggataaaagactttgcaaatgatttagaatcatcgtgtctgctttgcttggcagatttcttttcagacatccaagaggtggcaacttttgtttgaaacatataatcacaccaattatttaaaaaaaaagacaaacttaaatatttttaaacttatttttcctcattagtggtctgtgcctctataagaacatcattgtctttttatccttagatgatgctattgttggaacctgggaaggtcggaaggaatagctgaggtaaaatcatggactttttgcctgaaggctgccagtggaattgggaccactgtctcaggctccacctttattctctagttgtatcaggaaaagagctgctgttccttgtgctcttgctatctggcatgcacagagccctgttgagtcctgtccgtgagtgcctgaagtgaagatcaccattcttgttttacttatgaagagatggaggcccagagtgtttgtctgagctcaggcaggtagtggcagggttgatttggaacacaagtagtgccctggcgcctgagtgaccagggctaattcagtccctttatgtgacttccatgttgctgcagccctggcaaatataacgtctaaaatatcactccacacagcaccagccactgcctattggcattgtttggcagaacactgctccctgttctatgtcctggccatcctcagtcatattcatggcagactctcaatctgcacagcagggccccattgaagcattggatctgccctctgctttcactggccctgcttctgcacagtctcagacatctgagtggatgatgagatcacatccacccctatgagggtcgacgtggccaagttatgttgcactagggccactctccctgcttccatgggtactggctgtgttcgcagtctcctgcacttggctttcctcgaatgcagcaggcattgctgctagaggggtccaggcgtagctggccacagagcctgtaggggctgaccaggaattgctcatctccccagtgccaccagccagcctctgggaaagcctggatcaccttcagtgtttaatttcctcagtgtgccagagccaggaggattcctggaaacaggtgtattccctttcttaggaaaccccaggacctcacaatccaaatgcagaaaaggcccgtagatgattgtcctctggaatcttccaaaagggtctgggaagcttctgcagagactagggataccaaaggattagaagacaggaggtattttctgctcttgtgtgttttaactgaagagaaaagcagatgcagcaaagcactgcttggggggagcgggtgggggtacatggtgtctctgaataagatctggtgcctgacctgcagctcagaacagcttgaggctggccagttggcttgggttagggagtgacttcagacatcccaggaaaaagaggttatccagatgtttgccaagagttctttcttctgtaggtggagcaggaaggagaaaaatgcccaggctgtttggtcatttattaaacactgttatgcactggtccctgagagctcaggagtaatgggaaggctgccatggagtggactctgtccctttgcactcagtgcgataagaagtgatacccctaatgtttactgagccaggttccttagcactttctctatattaatccttctaatctttcccacaacccagtgaagaaaacaccaaggtgaccctctttatagatcagaaaacaggcctggaggggacccacgccttgcccaaggtcacaggttggatacagcagagctggcctccaaccgtggagcccgtgcacttaacatctatttggatggaaggctcgaaggttacctgagacaacctggtcaaggtgataatgtgggagaatgtggccagtggttcccagatgagtgaatgatcagtgtgcagtcaccagaggatgggtgataaaccgagaaccacaagctcttaacactgtggggtgggcgaggcttcatctcccaggatgcagcacttgctgagttgggcaacaggggaccctggttgatggcccaggttggttggaagcctttgggagatgtgctctgtgttggtggggaaggccaggcatggttagatcccctgtagacttggggagctcagtttcagaaagtttcaaagatcatcacttgatttctgtgattcacgtgatctgagggctctgaaagtggtgggtgagtcctggaattaaatctgtttttttcaagtaggaaagacatggggtggcaatgagagacatctgtgtggctcagaaagatgtcttgctgaggtcagagggacaagagccaaggagaacaagaggagcccttcccaggacactcacaatgacagagtgacgagggccagtaaagagtgtcagggggtgagagcccgggtgtgaactgaacctactgaggagagctgacgaccacaaagcatcttttcatatcatgttcggagcaaggagaacaagggcttcatagatccatcgccgtctagggcagctggtgtctgtgaaggggaggaaggcacagctccactgtgcccacagcggtctggacagaggaggatctgcaggtgcaaagggcgcaggcaggttcccggaggaaagcaggagccacgtagcgtgggctgcagtgtgtgtgctcagggctctgaccaagagaatgccctggccagggtatagcatgacctggaatgagatacccccatctgaggtgctgtctgagaggtgttggaaatgaagcccggaggtggaagagactcaaatctgatgttggccctgggaaagatcctagactaagaagaaggctgtgagtctgtgggcaaaggagagacgtgcatgaggagctggcgggggctccctggggacaagtcatgccagcctcacgtcattttccaccttgcaggtcttcggtctggcccttgttctgttggggttctggaggacgtgctgtgccctggccttactgaccttactccatgcagtgctgatgcatgcgacagcggtgaccctccagggtcccaggtgggatgaaaggtccccagctagttcctagtttcatctcctcattttctccatcctcctgctccttcttattaagatctggatgttaacattgatggagtgtgaagctgggtgggatatttaattcagcagttggcggtgtcaggatccacagtggtctctgaaagctgagatgctgccctgagtttatcgggatggcatttggcagattggagataagtgcatctgaattgagacacatagcttccctcatatggtttttatgaaaatgaaatgaacaaggtgccttatttcatttgttaatactattgtttgtcatgtagatacttacgtagccgataaatggtaacttctattctgataccctgaagcatcctgatagcaaatgttccatcctgctgtaaaggagaactggtttcttccaattagtcatacatgagtaggtctgggatggcctggagagacagcttagccagagcgcattttacagatggaaacctgaggctcagagaggttgagtgctttgctcgggaacacagagaggagtgatgtttctgcctctgcctctttgggagacactggccgacattcacctctgacgtcaggcaccccctctgaggaatccactcaaaaagggcatcaggagtggtgtggagcctgctgcaccacgtggtttgcgtcctcttcatgaagtcacacggggtggtctgcagggcaaggcggggtggcgatgttccacaggagctagtcaaaagcttgtgacaaaagggaacgtgaggttttatgttcacttttcttgctttctctctgatttatcccatgctttcactccatgagagggttgggctctctgtctcatctccttgagagctcctgcaggaagtggctggacgcaggtacatcctttcatggctgggcgggaagcagggagaggaagaagctgatttggcccaggctatatttatgcatagcaagccatggaggctctcatccactcctagattctccctgagccctgggataaatattttctaaggatgagaattctggaatgctgagtggagtctggttctgccagtacctctcaccagtggagggggcacttgaagagcttgagttctagtttccagaacttgagggtggggctggtgagagcgggtagggatgaaggcatcccagcagggctgataccacctccccatgggtgccacctttacatgtggtcagtgcatgtcttcccttccacaccgtgggcacttccagggtgaggctgaaagctggtccatccatggaggtccagtttggcacaggcaggcagttcgcgaagctctgccaggggagcagagaagcgagtggatccatgtgtggggagaaccaagagtgagcacttctggcgagtggagatgaggttacacatgctctctctaggggcagggccaggtggtggggtggcagccccttagtgtgggggtgggggccaggcacagccagacccatcctgccaagcctgcatgtgcattgctccaacttttgtccttctgtgcacctatgcctacagatcccctgtccccaggtgcctgaagtggcctggcactcctgagggtcaggagaaaaaatgagtatggcaaccagcaaggaaggaaaactgccctcaaccagggtgcaaacacagtcgaattaagtcagagctggcaggcagaagccctgtgtgctctgtgaatgtggcagctgctgctagatgctgacaggtgcaggggcagggctgagccggcgcctccgggtggcagccgtgtgtgtgtgtgtgtgtgtgtgtgtgtgtgtgtgtgtgtgtgtgtgattgttattgctggctcctctgggtggcagccatgtgtgtgtgtgtgtgtgtgtgtgtgtgtgtgtgtgtgagattgttattgccggcatctctgggtggcagctgtgtgtgtgtgtgagtgtctgtgtttgattgttattgttctgtgagagagtcctggaggtatagtgctctgagctgaggtgagttgtcacatccatagcaatcaggattctttggatgcaaaccacagcgatggactctggccaactttgtgaagaaggaattaattagaaggttatggtggcaggtagatcacagtgtcagaggaagaactggagaaataagctcaaaaaagaccgggattgagctattcagagagttccagtaccaggcacacataagcagcttctcaaactgaaactgggtttggttaggaaggatgctgagtagcataaaacagaaccaagccatctgactgctcttgtcgtagagatcgcgtattcctcctttcctgtcagctggtttaaaaacctggggcaaagggggaccctgcagtccaccccactcttcctgagatgccctgcgggggttgcagagatagatcaaacacaggctgtctctccccagggaccaacagtccagtaggtgatagcggcaacactgactatggccaggcaggctgctgaaggtggtctctgcaacccgagtcagcatggcagccctgacggtgttttggtgtgagcagctcgcagatgcagcccagttgttttgctttctgggctgcttcttgagggtcacctcaagtctgcacacaagggtagagctgcaagctctggagggaaatagcactgggttataatttccactggaggacatctataatttcatgtctctgagtgtgagtttggccacaggctcctctgtaggtgtctgcacgggaaccagtgaggaccctcaggcttgagcccccattctgctggatctggtggtctggaaggctgggcatagtgtgactgcctcagcccctccatttgtgctagggctgggggagaaggaggatggggtggggagttctctgactttgcacggtgggagtacacccttcttggaggatatgagtgcaaatggatgtcaaggagcccagagctcttcagagcaaagagctgggcaaattcctggctcccactctaactctctctccttattctcccatacctccctcggcagggttgaatttcacaattgggtctgacctggcttagtgtgaatgaaaagtggtcgtttacaggaatcctctctgtctcgctgaattcctgcccctcagtcttttcctcacgattgaaatatacccagcccttcttttccactaggactttgcctgtgccatcttaccatccctgattggtgaactcgtattcatccatcaacacccagagataatatcacctcctcaatgggacattcctcaggcaccccaggcagtccatggtccatccctgatcttgaagcatttctcccaaaccactcaagtgggcttgtctccatcccaggtcctgttacgaagaggtgtttttctctctcattgcatgtggagcaatacttccatgctattcatcctgttatcacagaataaaagaacgactgtctcccctaagagatatggtgtgggtccctgtggctagaccatgtgatcttacccataaacagtcctcacaaacactctcgatttacgtctaacccactcttgtcactgcctggcattcgcgtgtgccgttctttctgccctctcttttctttgtatctgtctgccctttggaggcctcctgcctcttccaggagggtctctctgattattctggtgcccagaattagaaagtatatggggtacatgctgtggtgtgtggtaagtgtttaacagctggttctcagcatgtagctgcaacatggattttgggtgatattttcatttacaataaagtgtaagatgaaagtggaacaatgaacatatgtcagaacttcacttgtttgtcagtgatctaaataacttctttcctaaatcacataatagtttcggaatactagaagaatagtccctcagctttttgtgagctattcacaatataacagctatcgacaagacaaaaatttcagtttaatctgcattattgacaatttttttccattactttcttaagtccagacaatgaacaaaacaagaaatcaagccttgatttatagcatttccataaataatcccattctggctgattccctgatttctggccactcacgatatccctggatgtggcatgaggaggagtggaccgtggcaagcccccgcaccggcaggtggagcagcgtccacagcgtaggcaatgggaatgtgtagtagaatgactaggaaatgatgggttctgagtatgtattgcctgtgtttttaatataacttctttgactgtaagtttgtatagtttagttttgaataatgtctgagttaaaacagctaacttgaaacattcctgatcatctcacaagccactgtgagctggctccagcacaccactggctgcataccaagaaaatcaagttgcaggcagagacgaaaaccttcagacagaattgcgtggctgtgtccactcagtttcgtcagggggtgagctttattaagtgccacagtaacagatactgtcattggttcagtcaacaactgtttctaaccccatctcacttggctttcctgcactgcagaggttgggaagctaaatccatgtttcccagactcttttgcagccagggtgcaggcctttgacacagatcctcacaagcagccagatacatcacccagccccggatgtgcagtcgagtcccatgagctgaagtctttggcatgcaggtgatatctgtcactcacggtggcagggacatctggacttgtggggtggctgtggtggactttgtaggagtttggtcccttgtgattggtgctggtaccagcagtttctactagacagtgccagggcatggttaggcttttttttctggctaccctgacccttggagagctcccaagcttggtctctggctctcacagggatttaatgagctgcatgatagcctttaataagttcctttctgtttaaactacccaggtagaggctgctgtctgcaggtgggaagccctgattgctggaacctaagggatgtgagaaatcactgtggagtgtcaaggtaaccagggatctgctcctgggacctattaatccacctcttttagaaggagtccacagtcctgtttgtatttgaatattcatgaacattagaagagcaacttagtctgggtatggctatggctgacagaagtatcatgctgtgtcacagctgattattagatctgcattttttgccctttagcttgtcaaaataatgtctaaaaaaccagattgatcacaaaagatgcatcataatgccacataaagatgtcactcggcgccttatagtatttaggaccatagaggacacctggtgcagcctcctcattttgcagctgagcaagatctttgaaggacaaggacctgcccaaggccatctagaaacactgaagttgagactcatacccgagcatcttagcttttgcccaccccacgctgtttctcagtcttaaccagcaagctttccttgttattttggtttgtcttacgtctaggtttgatttggcagcacatttcaacatctggtgaaggcatgggaataaaacagtgtaggtggatggagcacctaagagcagaatgtttggtgttctctcagggtacactgggcaaggcctgctgggccgtccttcctcgccatgctgcctgcgtttattcagttaagaaagtggcacattttgtatctttgagaatgcaactattttagttaggagagtgatgttccgtctatggaagactttgcctctctccatcttgggcttggagaaggtgtcccatgtcccagcagcatggctgtgtacagtcattgattcttttgtttacttctccatgccgtacattttgttcctgtcccttgatcacaaagaaataaatgaacgttcctgaggcactgacatgggccgggtgaggtgggagcctccttctagatattattatcctatttaaatgcattatgttcccactcatttcacgattgcccagtattcagagaagttgcattacacaactgaagctccataataaatgcgtggaggtgagattcaaacccacgtctttcccattctactttttgtgcctttctgttttaatttgcttcttggtattcctgtgtattattaatagtctgaagcttggaaatagatgcaatagtcattagagtgaagaaaatacagtgccgtgctctctgaaggataacaaggacatttttgttgtaattactattttgatttttcttttaagaatgttgccgaggaaggaaaacagagggaaaaaccagcaaagctcactgtgtctaacttttgccacatgcatggacctaatttcttacttgccaagcactagagcctttatttttgagactctgtgagggtggctgagttctgtgtgtttgctggggttggaaaaatctagtgtgatgggggtcagtggccccatgacacgccaaggcagagtaagccacagagctcagtctgccataggtgtggcttccttccttcctcacatctgtgtcaacacccggcaggaggtgcctgattccagtggggatgaagcagcctctgcccatccctccatcacccatcaagagctctggacacacatgaggttgaacccccagatggtggctgccaggggagtgtgtccacctctcacttaggccaggtgcgtggcatctcactgcggcaggcatcccatgggcgaggtcggtgctctcctgatgtctttgatatttttctttatctggcctagtctgagaccagtactttcccctgcctgtgacccctgacttcatttgcaaagttttctcatgcactttctgaaattttcatgacagagagccctggaggaatttggggcaacgatggaggtggaagaaggtttaaagctgggaatctttatgcattttctctgttttctccttctctttattttttttcttgacctatacttcacactggtctctgtcttctccatgcttagaaagcagaggaggcttgagcttccagcaaagaccttgcgacatgttactggatacaggctggtgcatagaaggggtgggtggggagggctgacaggagggtgtccctcccctgagcatcaccggctctgttcttggccagttgctctttgtccccacatttcaggttctcttcctgcattcaagcatgggcagggccagggctgctgtttcaggactgcatctagccctgaagttttctctgggcctccacaggggaccttcctactctgaactccacatgcattctccaggccacactgcacactcaccctactctccagtcatttccaactacttagaattcagtcagtgttgagagtcaccagtcttatgtagactggagcctggcacatagtaggtgctttttgcatgtttactgagtgaatgaatgaacagaaaatgaaatgcactttgcctaaaagctgatctgatctgatctgagtgcccaggcatttcacccttcttccaaagctctccttttgttcctgtggcccagggaatgctcagttccaggcttggcagaggaggggtctctctaggcagtgtgaaacagactgtgaagcccccatgagaaatagtccacccactgggaaggcccctccgctcccaggaaactccagccagagcactccagcgtgggggctaggactcctcttttccaaaggagagtagacagtgggaggaattcacctcagaatgatttcctggagcagttaggaaagtagcatctctgaagtcacagaggcttcagctccactgggccgtgagaatcccttacagaattctgaccccgaccaagcagaaaagggcactgccgcctttaaaacagttgactgcagaacaaaacaaaatgctaaaataagactagagtagtttgaaaatattggaaagttgagaaaaaactcccccaaattccatgatactagcatcatcatagtatatagcacattacatatatagtgtattatatggtatattatgtatacatactatgtatactatatgttatatggtgtatgtacatagtaaaaattatttttcacatatctattgctttggtatgttttctttcatgtttttgtttatttggtagataggcttttttcctgttttgttttacaacatgtttatatctgacactaacattgtattataagcttttttttcccatactattgcgtagtctttatagccacacttaaaaaatgaatcatttatttctaaaaacagtcaggtccattttattttggcttctggatcctgcccctccccgggcactctcccactgcagaactatgttaggctcagttccccagagagccctcaggttttccacaccacaggccccatgcaagcttcttgtgaaccctgggcagtcccttctgggtcctcagagctcagtttagatgccaccattgcctgtttgcaacactggcacatgtgcaggtccctgtgttctgtacagctgaactcaggactgcctcatcaccactgtcactaccgcgcctcgcacagggcccgcatgctgcatgctctcagtgaatgcttgcggaatgaacggaagagggaatcaatgaacaaatgacctggtggtcattttctgtgtttcctcctggggtttttcctttggtgtatgcattttgtgtgtgtgtgtgcatagaataggttacaccaaatctataatctttttgtccttttgcctcctcagcattcgttcataagcatagcgagcatcactgtccgaggctgcacagtgcttcgtcttgcgtatgcatcctgctttgttcaccatgtctctggagttacgcatttacttgcttgttgctttcaccactataaaccatgcctcatttccctctcctgttaggcagatctgacccttcagcctgcctcttccagccatggtcagactgttgttagtccagcgcctgagggagagtactttcagagttccaggcccttgtgtgacctccacccttaaggtgactcttggcacccacaggccaatcagctgtattcttagagagctctcagaatacaggctggtgggctatttccctaaggaaaagctgggtgggttctcactggggttggaaccaaggggagatgaggaaatgggaataggttggacgcccttggtggagcttcatagtttgattttacatcagagttggaaagcaaagcatacccttctgctacagctagtggtttccccacctgcgcctgagctatggactgggcaggggccaagtgcccagcaaggagcacagggaaggagcaggaggtggagaagctcagaggcaggctgcagtaggctcctcgcccttctcaccatgcggatgtctcctcccttggccctatgggaatatggagggctcacattctcctctctgtgcaggagcaggtctccacactctttgggaggaggaagttgacttctttctaacagttgctgtcctgtcattcattcattcattcattcattcagcaaaggcttcctgagctcctgtcctgttgcaggcttgattaagtactacagatgtgaaggtgaattgacatatttgggttcttagagtttgccttctagcagaccacaaacaagtaaatataatgttgcacgtggtgcatgcaggcctttggtgcccaggacagtgagggcatggaggagggagtgttgtctgtgtctgagagcactgggcaagcctcaaggggagactgtgcctgaggtgcattttggaatgagttcacaggtacgatgggaatgaagctgcccacatgtacttgggagttgggggaagagtggggacacttgactctcacaagaagcatggctctgagaaaatcagagaccgcgcagaagctgacagggcatgtgatgtggacaaaggggccaccaggctgggaggcaggtctggtagaccgaggagcaatgggttgaaattagggtcgggacagagagggctgcatgaggagcaaagaccatgaagtccatggtcctccaacactgcgaccctcatgctgcggcctccctgtgccctcagcactcagccagggccagaggtagctcgagcatggagcaggggctgagggtgcatggcttcctcatgatggagtctacttgttgacagatgacccagaaacttctgaagggcccccaaggccctaatgcagcccccagagcaggctctttcccttcccctgcagactctccatttcatgcctggttaatccccaggaaccacttttgacaggggaatcctacgtttctctctactgagctgtagaggctgctgcccatgggcattttcagcagagacctcagtccctactctgcctcagggaggtgggccctggaggatggtgccatccatgctccttgtctcctgagaggtggtgcagtcagcacacccatcccacagacagcggaggaggcctgagcatcagggtcctgtctgatgccagctcatgatgcactgtgcctgagtgatgaatgcccatctcactgcctgtcgcttcctctctctgcagggccctgtggccgagtgtgtccagcccagtgtcatggggagcttccatatctcatggctccttgctgggccaagccctccagaaccccaaacccccaaagactgatgaatgccagagtggccaccttgcttatctgtggccccggccctggtgatcaccatggcagctgggaagggagccccgttgagcccatcggctgaaaacagatggcgacttagcgaacctgagctgggccggggctgcaagccagtgctgctcgagaagacgaaccgcctgggccctgaggctgctgtgggcagggcgggccgggatgtgggcagtgcggagctggcactgttggtagccccaggcaagccccgacctggcaagccgctgcccccgaagacacgtggagagcagaggcagagcgccttcacggagctgccgaggatgaaggaccggcaggtggatgctcaggcccaggagagggagcacgatgaccccacaggccaacctggtgccccacagctgacccagaacatccccagaggcccagctggcagcaaagtcttctctgtgtggcccagcggagcacgaagtgagcaaagaagcgcctttagcaaaccaaccaagcgaccagcagagaggcctgagctaacctcagtcttccctgcaggggaatctgcagatgccctgggggagctgtctggactcctcaacactacagacctcgcttgttggggtcgactttcaactcccaagcttttggttggtgatttgtggaacttgcaagcattgccacagaatgctccactctgtagcacttttctgggtgcccctacactgtggctggagcatacccaggcccaggtgcccccaccctcatcatcctccaccacttcgtgggccctcctgccacccaccctcacctccctgggcttgtccacccagaactggtgtgcaaagtgcaacctgtcctttcgcctaacgtccgacctggtctttcacatgcgatcccaccacaaaaaggagcatgcggggcctgacccacattctcagaagcggagagaagaggcccttgcctgccctgtgtgccaggagcacttccgggagcgccaccacctctcccggcacatgacttctcacagctagcaggtgaccgcagaatgacctgctgggtgcagcagccagcctttggcagaggggggctccctgggcctgcgttgagggggctgtcatggtcctttgcagagctgctgcttttggcattcatagataaacagctcaggcataatttgaaaaagccacacctgcatgatgtgttttgaaggaaatgaagtcctgaaataaagtgatgggctttgcaaatccagggtagaggccctaacaggcacagagagcaggggcaactcctggcacacatcatgggctttggaggcacacaagcctggattcgaatctgggctctttcacatactagctgtgaccctggacaaagagctttaacctgctgagtccccattttctcatctgtgaaatggagatgataacactgtgtcttaggttggcattcaggtcacatgaaaggtgtgtggaaagtggccagcattctgcctgcagaccctgagcactgagtcaacaaggtttgtgatgatgtctgtactagttagctattgttattaacaagatctccatggcagacaagctaaagcatctgcctaagtcgtgagtctgtgggttggctcaggttaagctgagcttggctgggcttggcagcaagtctcagatttgatcaagtcatattcgttttcttcttcggctggtgggctacccagagcgagcacgcttctctcgtggtcatgccaagaacacaggagggtgagtctaacaagcacacctcaagcctctgcttgggtcacattgccaatgtcctctcagcccatacaagtggcaggaccaggcccaatattaaggagtggaaaagtgtaggctgcccttggtgaagctgtgacaagggagtgaccatccatcccctccacaggagggtgaggaattgggacaggtaattccagccaatacctggtccatagttcttcacattgtgagtatatgaatacggggaaatagaaccccctccccaccacctacacacatgctgttttaccttccaagaataggacatgtgcaaaaactaggcttccagatcgtgaggctggggagcattctaggtaccatttattatctactgcgtttcggtcagtagctgttgtaggtacccgcatcagcccttgttcctaaggatgtgtggagcccaggctgtactctttgacattccacaggtcagtctgcgtgaaagccctttgtggggagtttccaagccagtgtcgtttttgcactggtttccacctcactgtcagatattgttcttttgatatgcagtttccagccctccaatgagtccccagcacagatctcaggcttgtggctgggaataagcccagctgagcaggtggggatctcagccagcctcccagactgcacctcttctattgctctcctctgtccaccgttccaggcagcagcactcccacctggctgctctgatgtcctcgctccctccattcctgcctctcaccatgcacgcatccattgtccacacacacacaaccagataatcttctgaaagtgtaactcagatgatgcctccaaccctgtggctgcccttcacacttacaggcctaaccccagcaggacctgccagctgcttcatgaacaagtccctgcctcatgttaattgcaagcactcatttcactctccctgtgtgccaggcaatagcataagcactggaagaatacagatgttatagtgagtcctacaatagccctggaaggcaagagctgtttcctttccatttctacaatgagtcaattgcagatgatgctataacacttccagtgtttctgacacttccctgaagctatacctgctaccttcatgggccgagcttgcccttatgaggcccacaggtggcagtgggcagaggggaccccgctataccacctcgctgctgttccactgtctgctcccgtgttctgaccacagctctggtgccgtttctcaagcctgggcttcattcaacattttctatctagctcttcatggtgctgctcctgctatggttccacagggcttcttctcgcaggtcagctccttagagaggtctcccagattccccgtaaagcagccctgcagcctctgcctctctcagccgcatcaccctgttgcttccttcacagcatgtctcaccatctgcaaccatctttctgtttgtcgtcttgttgatttgctgcctccacactgtcagctccttgggaacagagattggtttgtttactgtgcatccctggtgcccagaacagggcatggcatattgttggtgcataataaatattgtggaaataatttctgtgtgagaagctgggtctgaatatgtgtgcaatcttcctttggctgtggagggttgcaggaggctgccatgcagctggaaggctccatgtgtactgagcttccttcacctacgctgtctccctggccaggcaagggattgagtgagtgggtccatttccattcatttattcagcatccctgggcactttgagctgagcctcaaaggcaagtatgtgccggtgatttggtgatgcaggcaggggagcagtggctgaggagaaagatcagtccagagtctgcaattgtgtcagggtgtgaggaggagatggaggggcaggggtaggagggcctcacgggagagcggtttggaccgaggggactgagggcttggctcggagaggcactttgggggtactctccagctgcagtggggagcgtggcctggaggagggggcctggaccccctgagctcattgtcttccacatctagaagagggaagggtgctccctgcaggtgccaataaagcatcatcattcccaaagggacactgggaggtcccttgctcactaagacaagacaaggaaagctcagccttgctggcccctttaggtgctgtgtgggggtgtcatttacacatggagaggctgagcacagaaggcagctgaagctatgggagcctccccgtgtgctgtctcaggtgaggcaggaaagggcaactcaaggtctcggcatgaggccccacactatgcacttgacacgcagcagccaggaggcagattgttattaataattcccactctgctgcagatgacattaaactccaagaggtcaagaactttcctaagaccatgggctcaggagcatcagtgcaagaataagactccaggaccccagattgagctcatgtcctttttagcctgccacttgtctgcccagcccagtgtggttggatgattcaggaactgggacagcagcaggtgtaggctccctgtctcaaatttcaattcacacctgctactcgtaaacacacacactttcctatcgtccttctccagcactttcactatcttgcatactaagtctttgactgatttgtcttgcttaccgtgtctcctatcactagaatgtaagctctgtgagggatttttggtgggttttttttacctgcagcattgctggcatctagagaaatgtagccacatagtaggtgttcaacagacatttgtcgaatgaatgaatgagtgagatgcctggttctggcctggcaattgccacaactcaaatcagcttctcgggagggttttaggatctatcaaatgctgtgcacaattgtccttctctggcttaattgattggtttgtaatttctgtgaaatctctttgaaaggcagaaatgtgccaagacatgatagacacttagaactgaagggactttagatttctagaccacaccctccctgtacaacattggactttgaggtccacagacatgagctgatgtgctcagcgttgcagggcaagtggtggtgaggtcaagtttagaaccactgagaggtctggaccttgccccatccacaatccatgaggaacctcagctaggccaaacgacagtttacactgcatgtgattagaacggcctcacatgtaattattagtaaccttgaccagttacaccattcccaagcaggataggcatttaggaaaatttgaagttatgaaaaacaacacactatcttcccccaactctgatttttaagttggagttaattttggtaaaaatggatgtagatccaaattgctcacagcctgccatttaaatggacaaactcaaaagtgattcgtggaagtgatgggtttacagcttgttaatattgcagtcccaattatcaccaggctgggttcccagagtctctttgggagtcaaatcctctcttagcccttctccatttctgccctcctgtatctcctggagagtagacatgttaaatcatggttttgctcaagctctctctaccacttctatggtctgaatgtttgtgtctcccaaaacttatgtaaaatcctaacccctgaggtaatggtattaggaggtggggcttttgggaggttggaattcgtgcccttacaaaagaggctgggtgcagcggctcatgcctgtaatcccagcactttgggaggccgaggcgggcagattatgaggtcaggagtttgagaccaggctggccaatatggtgaaaccccatctttagtaaaaatacacacacacacaaaattagctgggtgtggtggtgggcacctgtaatcctagctacttgggaggctgaggcaggagaattgcttgaacccaggaagcggagtttacagtgagccaagattgcaccactgcactccagcctgggtgacagaggaagactccgtctcgggaaaaaaaaaaaagaaagaaaccccagtggctggctgcagtggctcatgcctgtaatcccagcactttgcggggctgaggtgggaagattgctcaaggacaggcatttgagaccagcctgggcaacatagtgagacaccccctctacaaaaaatacaagaattagctgtatatggtggtgtgtgtgcctatagtcccagctactcaggaggctgagatgggtggggtgggtgggggagttacttcaactcaggagtttaaggctgcagtgagctatgattgtgctactgcattccagcctgggcaacacagtgagacccagtttctaaaaaattaaaataaaccgcagagacctagttccctgcttccaccatgtgagaatgcagctgaaagttgccatctcccaactaggaagatggcaccaaacaccaaagctgctggcaccttgatctggaacttccgagcctctagaactgtcagcgataaatttctgttgttaataagtcatccggtttatggtattttgttatagcagcccagatggactaggcagtcaccttctatatgccagttaagagttggcatgagatgttgccacaatgtatcacatcagcaggtattaattttacaatcctgggcaagaattaccacattccttaaattctctatgtctaattgaatcgctcagcaccccatcctgtgggcctggtaagatactcaccctgtcactattgaattcctaacctgtctctcaagctcacaaaagctcctcaatgccccacctcaagattgtaccctgtcgcttagtgccccagggtgtccccttgctgttctggccagctttgcttctgttctccactctcctaggatctagggccttggtggctttctggcaaagctgttggtaggcatgtgacacgaagacactgagtcgatgagcagaaagtcttggctgaccttatggaacagaggaggaaaaatatccacagtagctggaaacatggcaaattctatcttaataaattatctcccagcggcagccattcaattcagatttataaaagtcctcaaaatatgctaatgaggctaaactaagacattctgaattcagattcattttggttctcgattttaacaaatgtcaagttttctttctgtttttacctgggaaaggagtaaaaccactacaatggtgggctcctagaattcaacttcttgccaattcctgcatctctaggccagggatcctaagctcaaatgtctattgaagtaggctaatgagtggatggagctgcctgtaagtggcaatggtggggagctcaatgcctgggtgaagactgcacagccaggctggatgcaggcctcgagaaaggccagagttcaggtctttatatgaaatttgttgtcaactgacacaatagttttgcaaacactgatggccaaagtgacatagattcatggaagcatgtcagtggtggtgatggtgcagggtcgccaccagccggtgaccccttactctgttatgctcccagctttggaacaggccggtgctgggcctggcgcttctaacctcagccgtaccaccctgttcctgtgagcacggagagagagcccttatcaggggtgaaagtcggccagagtagcccccaggccgggcttgcactcctcattcccttgggaagtgatggcgccatctggaggcagcaggccttcctgcaggccacttcccttcagagagggaatcacacacccttgtcatttgcctaattttgttgtgtttttagaagtcatgtggtaggtctacagatggcatagcaagatcagaacctcataggataaaccttttatttgaaagataagccattctccaacatgggttgggttgtgacacttcctaggagagaagaagtttcagaaaccgttttgtttgtttgttttgttctggttttggagatggagtcttgctctgttgcccaagcctgagtgctcgatctcagctcactgcaacctcagcctcccaggttcaagtgattctctcgcctcagccttccgagtagctggaattacaggcacccgccattatgcccagttcatttttgtatttttgtagagatgggatttcaccatgttggccaggctggtcttgaactcctgacctcaggtgatctgctcgcctcagcctaccaaagtactgggattacaggcctgagccactgcgcccggcccagaaaccggttttgaaagggggttggggaggcagtgcctgcagggagaatgggaggggttctctaacgctttctttccattcatcttgccatctcgtgttttcctggggcaagacggaggaagccactatcgtctgatcccattgctattctaagctgcttggattaggaggctatttttagtgctggcagccctggtcagcaaagcagagagggtacctaggccaggtggcagctaaatcccataggaaccaggagatgggaggtgggtgcccccaggcagggaccttggaggtgggtttcctggcctggagtgtgaaccggttgcattgcttttctttctgagtcacatcgtttcaccgcatcacagctgtgtgggtaaccagggccctctggtgcacagtcagggccctctcctgtgtaggcctgtgcggggcagacacagggacacaggaagaggaagctccttcctcattgcttcagcccagcctgaaagcaggaggcccgcgagggtccccatgtggtccttttgcattccctatgtatgaagcatatcactgcaatagtccctggcccctccttccctggatgggggtcaccacgtctccagcaagaacttggaggtgaagatcaccttttccttcctctccttacagagcctggcagaggcatggcttgttgctgactgagagcatctggaaatgagcccccagcactcagagtcaccaccctcaccatgccccccagctctgtgctgtcagttcctggtcagactgcaaagatgcccatgagtggactgtgcccatgccctgcccctgctgctaacacccagtcccccaagtcttctctggcgccagggaccaggtctgagacagctctgtttccaccacttgccctgtggctggcctggcatcctcaggatctgccctggaggggaaagaaaggcagggagagatgggcccagtataccctgagttcttttctctacccaatgactctggcttggctgcccagagtgtggcctgggctttgatagtgaacaatagggaagcttctaggcctgtcttgccccagagagccagctttgagtccctgccagggcctttataatccatttattatacatgctgtcacaacagggctgagctgactcctgggggcactccagcacccctggatgccagtcaaatgaacccctgcttggtactgggtgacttacctcttcaccacatctgcaagagggacagataaatatgaccttccagaagtgtctgcatcacctaacaatgcccttccagtgaagatgaacccctagctgcaggtcaggccacagagatggggcaggaagctgtgtcagggatttaagcacaaagctgggaccccaagacaaggaagggaaagacgatggcaggctgggtgcagagcagagtgacattaactcaggtattaacttatcttgggtcctgatcattggtggacactgggtgagcagtggggggacagagttgagggagtctgagtgtctggaaggaggtgtggctgtgtgcaagatgtgagttggaggtaagtagggttgggcagggtgcaggccatgagctcagaccagggcatagagagttgaaggggcccagggctcatctgaacttctaggcagctatcggccatctggctgtcccaccagaaaagagacctgatgggattttgttttccttttcctttttctccagtcttgtgcctgcaagcaggtaacaatgcaagaaagcttgcatttaggaaggctgagcctgttctttgctacgcagaggactctcgctcctctctatctcaaaccccctttccagatcaggcccagggtgtcttcatgatgtggtggaaacagaaggatctttggaactgtacagctatgggttcagatctcacctaccctttaaccagctgcaccagactgtgctgttcattacagaaaaatgaagtctttggtggatggaagcagacagggatttcaggagggagcccggatggtgcccagtcctagatgggcaggctgggggacctggctgagcagtgggttgggacaatgggtcactccactaggaccacagccaaagtcacaccaggaagtcgaggaagcacctgttgagggtgctgctgctgtccctgctaagcacagggcatggctgtgctgtccctgtacactaggcttctggcagatggccgctgcccaggctccctggccacttgctccagattaaacatcttgcacaggagcttctggttgaccaaggcaggatcacatgcccatgccctactgccagaagggctggaaaagtggggcttccagagtgttcagctttgtggtggagaaattatgacagctaacattggctggacactagattaactcacttcattctcacaactccaagtgtagtattatttctcccattgaacaggtgaacaaactgaggcccaaagaagtgaaacaaattgcccagaaccactcagctggggaagtggctgggctggtttcccacccaggcaaggctgacatcactgtttcctactgattcctatgggcagtgattctctgatcatccaaaggtgctgcaaatgctgggtggcccaaaggaggacacaggtccaccatgctggatgtgtgaccttgggtgagctgcggagtttgtctgtgtctcagctggctcctgggtagaagatgagagtggccagctatgcagccggcatgaggctcagaagagacacagccagtgtatgtacatcaccagcagaagggccgcaccagccctttccctatttaagatccacaagatctttgccacctgctgaccccacagcatcttgcaccacatcttaaataaaatcagctgtccatagaggtcagcagggcagatccagaagatctaaataatgtgaatggagaactcatgaaaagaagagatttaacaaccactagtgatcactaaattgtggttaatggctcgggtatataatttattttatcttctttattttgtattttggaataatgatagctgcatctgaaaataatgatatatgcacattaatgagtatttaagaaaaagagcaaagtatgaagaaggaaggtaaaaataccaccccaagttctaccacttagaaggaacctttgttaaaatttaggtggttattggaaagccatatatatatacatatatatacatacacatatatatgtgtatatacatgtgtgtgtgtgtatatatacacacctccagctgtaacctaaccagagctcagcaggcccctttgctgctcctgggaacctcaggccgggccacctgcaggagtgcccttggtgtgtgtcccagaggttctgtctgccctggggctctgcctatggggcccttccctacaggtggtcctgcaggcctgggctccgcttcaccctcagctggttgtgctggagcatctccttggccctggcgagagcctcttctgcagggacaaccacatggggtgtcacccccaccccttcccaggagctgccatccgaggcccccacagaacgggccgtggggatagtgaggtagaggttggtgtcatccacgtggtaggtctgtggtggctggcagcccccactggtcacctccccaatgaccagggcccggcccagcctcttcatgatataggtgaactcctccgcggtgccggccgtcacactgctggtcagaatgaccatgctcttcttggagccatagcgttcacctggaagacataaggcccttcaggatgggggtcatgtcaggaccctggagcacctgtcttctctatcctgcctgggcctgcagtgatggaggaggcccgggggtttaggtctgtgtccttgtgtccacttgtgagccacttgacttctctgagccttgatttctgcatccgtaaaatggggacaagaatgcatgcccaatcacgaggatttcagtgcttgacaactcccaacgaggcctttttatgccaagtgataggaaaggcttgactctcctgagaaaggagcatcctctctcttcatgaataatgagaacacctaaaccgacctgacttccttttcactttggactcagaaaagcccaatttgtgatgtataagaacaactctccaggacagcactgtccaacaggaatgcaacgtgagccagaatgctggccatagatgtcattttaggttccctagtagccatgttaagcaagcaaaaagaaacccatggtgttaattttaatcatgttttgtttaagccaatgtatccaaaatacattcttttcaaaatgtaatcaaataaaattattaatgaggttttcttttcataatgtcttcaaaatctggtatgcacattacacttccagcacatcacacttccagcacatctcaacttgggagagccacatttcaaatgcttggtggccgcaggtggcttgtggctcccatattggaccttgcggttttggggcctcattatctgcagaattgagtctatctttaacttccagtcttgaacatctatttgaatttagaattcacctggttctgatttgcatttacacttgtaatattattgaacgtatgtcctaggagctacagcaaaatgcctgtgtattacagaagcatggacatgaaaatggtggggtgtttctctggtcacaggcacacccccatcggtctctccagtcctttcttgttgggtaggagcacaagttccttggtcttacacactgggcagggaagatagatggaggccatccaccctggaatggggctttgagagttatggttctgtaaagctcagggcctgcctttgctcctatagccactgctctgggcccagggcggggaacagaagcccgatcagcatcatgacctttccaggcaagtttgtggcactgtggcttgagagctcaagtactgtgagcactggcaatgcccactggggttggtgaggggcggggagaatccttcaaattctgcatttgtcctgcaggctggtgattatggtgctaagcctgggggaaattttggtattagacaaactaatattcacattttgggtttcacttattagctgcatgaccctagaaaagatatttgacctagtcaacacccccttttttttcctctagaaaacgggcatagtgatacatgcttttcagggattcgagatcatgcacatctagtgcctggactaggacagggccttacattctggttactatgacttttacctacacccaagctgtctttccctggtttcccagaagcttctagaatgacagcagaaaggagaaagcttctccacgtacctacaacctgggcgtgtgtccagagttcactgacagagtcatcaggccggctgtagatcttgtccagcagaactggagggccttcatcaaagaagtaggagcacaagatgggaatggaggatgtggggccaccgatgttgaacctgaaggatgggaagcagagcctgttcaggggctgagctcacagtgaggccctgtgtgcccctcggggaggccaggatctttgtcccatggagggttctaattcttggcagcctcagtctagtgcctcttcctcctttagaattccatgggttggcattttccagagtatttccaagagtactagtctctttagaacaagaaacttagtgatcaaatatgttatcctttccttctgctatgtaattaatacatgttaatatattaaaggccctgacaagtcctgcagtcagaaacttgttgataaatttcccccatttattgaccatggactgctcccctgcacccatatcttcctatgagtggaacacattttgggaaacattgtttttcccgttgcattctgtgacaatcttatgacacctaccagctgtcttagttcaggtgtcttaacagggcacttagtgtattgaaatattcaggcttgtggagctgcattgggagcaggggagcctgtatttctcccaggccatttagatttgtcccactgtgtgacctcgttgggcccctgtctccccactggggctagtgatgtgttaaggagcctcgtccaactgatggcctgggatggcctggctgggttcggggcctgtgatgtcagtgtctgaacctccaaacaaacctcaggggtgggagggtctttaagcaaagtgcacttgcaggctggggccatctcctctttaaaaagtgtaaatggcatattcagaagaaagagacttagcatgagtgtcatttgggtgctcaacagaacttctaaagaataaaatgatcagagagaccccaggagcctcaagctcaggctgtgaacacacacagaactggagccagggctaatgttttatctcccagggaggagaagcagtgggtgcaggaccgagagccacctagtgaccactaagaaccatgtgagtgagcgctgagggctagagaactggagctgggtgaatgcttctggtctgccaccccctgccacttctttcagacaacacgggagcatggaagggtcccgtctgaggaaggcaacctgcccagggagggtgctggggcatgtccaccaatggaccccagagtcatgggatgccaggtctggccactgcctgagggtactcatccacctcctacccctggtccatgaggtaaactcatgacatatgaggcacatttttacagaaacagaggggaggtggctagctgaagacatccttctgacaatcatttggtgatgcaaagaattcttttgttaacaatagtgattaacttctaaattttccctgtgtgatttccaaattctgcctgtacgattcatatgaccagggttgtcatgtgttgattttgtatgatgtgaggcacactcccaggtggggggcctggctgtctcacacaccactgaccatcagaatcacctgggatgcctgtcaaatagagattatcgggcctgtcccctggagcttctgagtcagtaagaggggagtggggcccaggaatcagtgtttttaacatctccttcctctcctccccactgaatcctatgaccaggcaaatctggggtaattctcaatctggaatgcacattggaatcactggagaagcttgcaaaaactaccagtgctgggccccacctgcaatgacagcagatctgctgggctagctggccgaagccctgataggcaggaggcctggcccccctcaggtcctctgctgtgtcacagggttccttttcttccctgctgtggcccatagctttgactgtcccctggcagccctgcgtcctggctaggaagcactgacccctggccactgacctcatgtcgatgatcatggcatccgtgtgcatgatcttcttccagatgtgctccaccagcagcctggagacctgggtgagcagctcaccgtccccaaacatgtcaaacctcaagtagccaatgttgtcctcaagcacgttagtgtggaaggaaaacttgatcagctcttcaaatacttcaggggaagggatctgtaagagttggaggtcctactcagtgtcaggaggagcagccagttttagagcccaggaaagcaggcgccatgggaaatattaagggcatgggacaggaactaacatttctgaaggaattagtagacaccagggactttcccagtggcatgtctggatgtgacatgccactgggacatgtgtgatctatgggcagcctccttgcagaggatgctcctgtctgccacccacatgccctggtgtcctgagctagaaggcccaggaatggactcccctctgacctctccaaccttaccagatacttcctatgtctctaagctgctccactggggcaggattggaagatgttagttacctttaccaggcacctggcccggtactaagcactttgtagagcttatcatcatcctcacagccacctgtacaggagataacacgatccccatcttttccatggaaaaactgaagcacagagagattaagtaactagtctcaggtcacacagtcagtaagtggtggagccagaatctgaatccacatctgactccaaatcgtgaaccttggctatactggaaaggaaggagatgttgatttggaaactggggattctgcaagcctagcacaggctactcgcacgtggatgcacctcctcctccctctctaaggctgctggagggaggcaggtcttggtgagattgacaggcaaggagacttcattgacagagacactgccctccaggccctgccctgccctcagtcacagctctctggcctcaggccactcccctctgctcctctccgggcctcagttgcggaaaatggggataacaattctgtagtagatgcttttggcactctcagccccctctgctttcagctgcacccgaccccactgacaggctctcctatagcacagccctgcctttccacccgtagctcaggccttctccaagaagagggagcctgccccaccctgaggcatgtctcagggcaactcttggccaatgcgggacaggaaccactgggccctgcctgcagagggctatgcctgggagcatccctgcactcgtcagggtcctggcttcagcagaacagctttgaggcacctgcctgtcagcttcccaacccactctccctgctccctccttcatgcctgcttcagtaaccgcctcccagacaaagcgcctgcacccaagccctggtctcagaccctccttgcaagggatcccatggcaaatgctgccctgcccaattgtgacgatgcagcagaccacaggtagaacagtgtggaggtgtgagtgctgcctaggtggagctctcggccagcgtggggcacttggtgaagtccattggccacctctgacaggtgttggcctcttccctagcactgacaatgagaagccctgccaacactcaccttccacccagccaaggctgaaatgccttctatcccaggagcttccgaactggcttcctgtgagtattggttggctttcaaactggcttcctgtgaggtgggtgcaaaagtaattgcgggttttgccattgaaagtacttttgcaccaacctaatatgaatgttctacagaggtgttcagcaaccccagggtcacagagagtggatggaacaggttgagaaagaggaaaggacttgaccggtcaaaacttaaacgtgagaacaaatctaaaagccattgtcacgcactgtgcacagagccctgcatgtgcggacaatgggtcaactcactcccgggactgggttcagccaggtctctcttgggtctcacctgcatgggcacaattccaggaatgcggtccttggcattctcagggatatgggctgccttcaggtgtgggtctccggagagcatctgcaggtcagcccccaggatctcggctagggccacttctgaggtcaccctggagtagcggctctgcagaccgctcagtttggtggccatcttggcccccagctcggcagaggcatagttatcagccaccagcttcccggccgtctgcagcaccgtgggcaccttggcacgcagagccactatgtcctgggctatggaaagggcttcgctcatgggcacagtgatgtcgggctccacaccagccaggtcccaggccttgcctgtggtggcactcatggccatctgggtgggcatggatgcatataaggggctgctgcccacctggtagatgcccacagagagtgcgcctccggccgtgggctccccaatgaccgtggcccgctgcaggtcctgcatggtgtgtgcaaaggcctcggccgcagagccactggtgtggctcatcaggatgtagaggtccttgtgtgagccgtagcgctggccggcgacctggggcaaggtccacacctccgtgacttttgaggtggccctgtcaaagacagaatacaggtgctggcggggctctgcctcaaagaagtaggagcagagcagcgggatggccgtggagtagctgccagggttgtagcgcaggtcgatcaccagcgcagccgtgtccaccagctgttgccataccagccgcaccagctgtggccccacggccttcactgtctccagttcagccatggcgtcaaaacgcaggtagcccagctggccgggcagcacctctgtcttgaacagggcctcaataaggtaggtgagctcctctggagaggggacagcagggggtggtgggggtgcttcctctaccaccagctcgccagggctgtggaacactagcaagcggtggtccccagacacctcctggaggtctgctgtgagctgagaggccagagactccaagtccacagctgtgcggtaggcgccctgggccagcttggcccgcaggagggcactggtctgccccacgacctctggccgagcatagtgggcctccagcaggtgccctgtgccctccaccaaggcccccaggctttggtggaactccagcacttcctgggctttgtccagggcctcctcggccagcacgatggcatcgggcaccactccaccacccagccaggcctcgccgtgattgtcgatgaaggtgaggaccggcacggtgagcgcgaggctgccttcgggtgtgtccagcagcggcaccgtgcgggtgtgcagcaggttgcccgcggtgatctcacctaccagtgtggcccagcccagcgactgcataaggaaggcgaactcctccgcggccgtggcggtgcggtggctggtgagcagatacaccccacgttgggtgctgtagcgtgggcccgggagctccatgtggctgaagtgctcctgcgtgatgttggtgcggcgatcataggtggtgaagaggtgcacggggccggcctcagggccctggaagtaggacaggagcaggggcacagcagaggatggccctccagggttgtggcgcaggtccatgatgaggtgctccgtgtcctgtagcggctcccacacctggcgcaggacatatggggccaacacacccaggacggaggcgtcagcaaaactatcgaagcgcaggtagcccacattgcctggcagcaccgacacctggaacacagagtccaccagtgcttgccggatagcctcgtcctcaggcaactctggggccacccctggtgagtcttcggctgcagcgtcgggcgcgggccaagaaggagtttctgtgggcccgatggctcgcaccaggagcctgggatcctcagacgcagcctgcaggccggcattgagcttggtgaccagatcttcctcggagaccaccgtggagaagtccatgctggccaagtgctgcagcagggtgggcacacggtccaccagcgtgtagtagtccttcaggacctcctggaggcagtggactacccctggaagggcgctgcgcagagtgaggatggccagggctttctccagggcctgctcggccggagtccccacacagggcagcaccccgctgccctcccacgtctggctgcctccaccaaggggccccagggacctggacacgggcaccgtgaagaagaagtcagactcgcctatcctcagcttccggaggtccagggcccctcccccagtccgctcgcccaccacgatggccctgcgcatctgcttaaggatgtgcgcgatgtcctcggccacgcccctggtctggctgctggtgaggaccaccacatccttgtcggcaccgtacctttctcccaggacctggggcaaggtccagatctccgtggtggtgttggaggggcggttgtagatagtgtccacgtgcaggatggtgttccctgggtgcaggtaggagatgatgtagggaatgccagagacctggcctcctgtgcagtgccggagatccagcactaaggcggaggtgcccatgagattcccccacacgtgggccaccaggaactcccccatcatgctcagcacctcctggcccgggacgctgtccacccgcaggtagcccacattaccctccagaacctcatggcggaggcccctttgcagccaggcaagcagttcctcttctgagaggctggtgagtgctgggacttgtgggggaggctcgggggtgctgggctcataggagatgaccaggcgaggatcgttcagggagctctgcaccccggctgtcagcacactggccagcgtctgcgggtctgagatgctcagaatctcatggctcttgatggcctgctggatggcttcctgcatgcccagcaggttctccgggaagcagtagttatccaagaggaccttggccatgtccagcaccaggcttggctggaacaggtgtgtggggccagccaggccacagagcagcacggacatgagcagaacccattctctcatcatggggacccagggggaggcctggctcctgcacaaaagctccctggactgtgtgcaaggccgtggccctgctctgtgcagctgccttccgcccttgtccttctcagctggtggacagaaggtctggggctaaactcctgagttggggcaaggcttccagctccagtaagcctttaatcctgtctaattcaagcacatcaaccctgggtatcggggaggagtggccagggtggtttgacccagaaggtacattgcatcttatcttgctgtgttgtgtctgcatatcataacattaatcactgccattattttagttcctgctacatgccagacactgtgctccatcctttacaagctgacagtttccaccagagccttgcaaagtccagttattaacttgcaagtcctccttggagaactgttctgccactgtctctcccgtggcctcagggaaatgtcttaattacttattgtgtagattaaatgagaaaatatgtgtaaagcacttcttcccagtacccagtaagtaggaagcactcattactggtaagttatctgtattagatattacctctgtttcatagctaaaaaacaaaaaaacaaaaaaacaaaacaaaacaaagcaaagcaaaacaaaacaggccagagagttctgtaactaatagaagcccatcgttttaggtgtggacagatagggggtgcagcaagaagaagtccttggggctacaattggcccatacagtgcagaggctgagtctgaggctggcatcagcctcagagcttgagatttatttctatgtccctttaatgcctccagggaacagaacgggtccccctacagctttctaatgctgggaatgatgtgtctggaccaccatgtagggtgtggagtgtagaggcgcccaccttccagacatcacaggactagtgttcccattcaaatgaggttagctctgagagttaatggctagaggggactcctgcttcttgaaggctcagcccacagcctgcagttcgcagggagaatcaagcaggaagtcttgggtctccgtggtcccaggcttcacatggaatccagatcattcctcctgactgcataaagcacaagaaacagggaaaggtagactgctgaactcttcagatcccagctcctgccacttcttatagaaataatgtgggtgctgcttgcaactgactggctgtagaaatccaagaagtcctgctatggggtcggaacctggaagccctgctttgccgctgaatgcctctggagatgggcactttcctcacttaacagacagacaactacggcccagagagtggtcgcaaggccagggcagagcgttgggagagctgtcccaagctggctccagcaacaccgccttggctgagcgggcagcaggcaggcgcccctgtgtgcctcagtaggcagctggagaaggtggtctcagggacgtgggctttctctacacagctgagacccacaatctgctctttggaaatcattatctgaggatgtttaccaactgctttatgaaggccaaagaggtcaattagctaaaacaaacatatttttagctcattaggatttgtgtaatgctcaagtgacatatggtcacatcactccaccgtatgcagccaatggaagtgagcctgatttacgatgagaatggggtggggctgggatgctgccaacacctccggatgaatgcactccttgcatatccttagccctgctgggaagcctgggccttctcctctgcctccacttggagaatcacagttctgagcatgcacttccgtgtcctcagagggcacttgtctgccattgcttgagtccaggcaaagcttctggcccagaaagggcttgggggagaacaggagtaagactgtctttggggaaaggattccctggagtcttactaagatgtagtttcaggataggattgtctggacctatcactgggatttgatttgtgtggctagcccagagccttaagaaggacgtgagaaaaaatcagactgttgcaagtccctggggtgcctgagttggatggggcatgggtagagaagcagtgcttctcctgtgggtaaggcccaagcaggtggaagagcaagttctgtcctcagagttctccagactccagggggccagggtgtccttgcccccaggccgtggggggatgtaggaagatggcagccagcctccttagctcatgaggagaatatgttctgggtaagtccccagagtgaaagccgagagctctacatcttcccatccagaccctgacaactgtagggccagggtgggttcagagagtccacttgatcttgggggctgagttttggagttggagggggctggaaggccctgcaccccctcacttatacaaatgtcctgtgggcagagctgtgcagggtagcttagaagccatcctgaactgaactggtgagaactgaataggtgagtgggtgagatcttgataaggtgacatgagaccttgatcaggcgacatgagaccatgattaggtgactcgactgctctgagccttggcttcttcaaaagggaaaacagaataaggagaaaagcctcagtattgctggaggattaggtgtttccatcctagaagttatgaaaggaagttgaggacgtaggagttggtgaggggcagcttgggtctgcctgggattagaacacccctgtggtattagggaaagtcattccaagaggctggggctgccctggagacctggagtcctagggcttcttaggctccaaacctttcctgggcctctacatatctaaggagaaatgaccagacccaggctccagagcccagccctgcagcacctgcagcgcaggttaagagggggacaatgacacatcagggctgctgcagggatggtcagggagcaagcggagctgggcagtacaggaaggagcgtcttgcctattgcatcacagatgttgtcttttcagtggccaaagccctcgtctgtctattgttttatgttagttttcccctcgatgttttataatggaaatgttcaagtggtacagcaaatatctatatgccatcatttaaagaaatgctttgacatgttcacattttaaagaacttatccgagcagatagcgattcatgaatctggtagctccccacaagaggcagtttggggctctgcaagggagcacaaggggaggcttccacagggtgaaggcagaagtggaataaatattacagatgctttggttgcttagcgtttcggcccttgcatgatttgggacatcctagtggaaagttcgagaccatgcaactgatgtccagttggccatcagtggttggctggacttaagcttcggtttcttttaaattagctgcttacagtaaatgagtctgagttagatttcaatttgctcttgtaggaaatcagggcgttagagccaccttagtttaatggctgcctccctagattctaccacagacattttattacccctttctcatctcagctccgcctcactagcctcttctaccctgcaagcctcctctcccctgcaaaccaacacatttttaaatgcacttcaaagcaaattgaaccttgactttttattcattttatgtattttcattttacttttttcttaaatcagaggagtaaaacatactcatttttgtagaaatgtgcaaacaaaccttttccaaagcttttaaaatccagcctcctttagtaacaaataatcagcattgaatgtctagccattgtcacctgtgtctgtgtacacgcagggaggtgcacatataggagagatccatccacacatctatgggcaccccatccatttgtccatcctattgtcagccgtttattagcatagatgataatttgcattttgttttactcacttaaacatacaacacaaacatccttcccagttgaagtatactcattaaactcatccttttaatggctacatgtagtctggggatccctaatctaaaaatctgaaatctgaaatgctccaaaacctgaaactttttgagcaccgacacaacaccacaagtgaaaaatttcacacataagtacttaacaccaactttgtttcatgcaaaaaattatttaaaatattgatatagttacctttaggctatgcgtataaggcatacatgaggcataaatactgtgtttagactagagtcccactcccaggatatctcattatgtacatacagatattccaaaatccaaaaagaatctgaaatctaaaacacttctttctccaaaactttcagataatggatactcatcctgtagtagttcttgatgatttactgaccctttgtgaggcatattttaagctttttctgtttttacttcaatattgtttcagcgatattgcgataaatgtttttgaaaacgcgttcttaagggcctaaggtgcttttttgtttgtggataaattcccaaacttgggcttgctgagtcaaagggcatatacacttgtttgtttcctgtattgtattttttcagtaccttttaaattatctaataagtacgtccttttttcactacttaattgatgtataattaacatataatgaacctatttgaagtgtatcatttagtcagttttgacacatgcatacccccccgaaattctcaccgccacctgggcaacatatattgctgtcgccctcaagttttcctggtgcccctttgctccccagtcccctctgcattcccatatccagacaaacatggatttacttgctgccaacactatagattagcttgtagcttctagaatttgctataaaagaaatgataccctttttttatctgttttcttttgcccagcataatgattgtgggattcacccatattgttgagtgtaccaatagttcatttattttgtttgctgagtagccttccattgcacagatggaccacaatttgttatccatgcacctgtcgatagcccttcaggttgcttccagtgatgaatattacaaagaaagctgacatgagccaggtgtggtggctctcggctgtaatcccagcactttgggaggctgaggtgggcagatcacctgagttcaggagttcgagaccagcctgacagacaaggtgaaacccagtctctactaagaatacaaaaattagctaggcatggtggcggatgcctgtaatcccagctacttgggaggctgaggcaggagaattgcttgaacccaggaggcagaggttgcagtgagccaacattgtgctactgcactccagcctggactacagagcgcgactgttaaaaaaaaaaaaaaaagaaagctgatatggatatttgagtgcaagtcttcgtgtggatgtgtgtctttctttttgctggagtaatataatacctaggataggaatgtatatttaacattttaagaaatgactcaactgttttccaaaatttaaatttctaccagcagcaagagactaccagttcctccacattagtggcaacaattggtaaggagagacagttaaattttagccattcaaataggtatgttgtggcatctcattgtgattttaatttgtatttgcttaacaattaatggcgttgagcatcttattatgtattcattggccacttgtatgtcttctatggtgaaatcgatgttcaaatcttttgctcatttgttggggaagggaggcagttgtttgtcttattattgataaagtaaaagttatttttatgttctggatgtaagacttttgcctgatatatgtgttgcaaatattttcttctagtccatgccttgtcttttcatgttgtcaactgtgtcttttgaagattgaaagtttttctttgatgagtccaaatttatcattttttccctttacgattcatgcttttagtgacacagctaagaaatctttgctgatctcaaggccacaaaacctttcctttagtattttgttctagaatttctacagtattaggtttcacgtgagtctatgatgtattttcagttaattagatatccagttgagcccacgctagttgttgaaaagactttccttgttctagcgaattgtattggcatcttgataaaaaagcaattgatcgcatctgtgtgggcctatttctacacagtctattccactgcgttcatctatttgtctgttttctacccacatcacactctcttgtttactacagtttataatatgtcttgaaattatgtaatctgagtctaccaactttgttattgtttatcaaaattattttggctattctagttcctttgattatccatatacatttttgattcaaatcattgactttacaatcagattattgattgggattgaattgaatgcatagatgagtttgcagacaatttacctcttaacaatactgagtcttccaacccatgaatacgttatatctctttacttatttaggccttctttgatttatttatcagtgttgtgtggtttcactatatagatcatgcaaatattttgctaggtttatacccatgtattttgtggggttttttttttttggtgctattgtaaatggcacttttttctttaaattttaatgtccagttattcattatgttttgatcatatattttacaacttgctaaactccttcatttattctagtatacatttggaagattccttggaattttctaaaggggtgttcatgttgcatttcttgattgacaacttaaggatgctatttttttttcttctttttttgagacagagtctcgctctgttgcccaggctcgagtgcagtggcgtgatctcggctcactgcaagctccgcctcccgggttcacgccattctcctgcctcagcctccggagtagctgggactacgggtgcctgccacgaggatgctattttttactcttgccttattgctcttgctagggtctccagtgccttgttcgtgatcttagggggaaaacatccagtttaccattaaatataaagttagctgtagatttttttttggtagatgccctttatcagttgaaaattcttttctattcctagtaatttgagaattttttaaaaatcgtgaatgagttttgaatatcgtcagatgcatctactaacatgatgttttttcttctttagtttgttaacatagttaatcatattgactggttttctaatctcgaaccagccactcatttatgggttaaatctcacttgttcatgatgtattagcctttgaatatgttcctggatttaatgtactggtattctgttgagggcttttgcatggttataaggaatatcgctctcaagttttcttttcttttggttttggtatctaggtaacgtctacctcataaaagtgttggaaagtaattttttctcttcctattcctccccctttctatttgctgggaaaagtttgtatggaattgatattatttcaagtacttgaggggctgagaagtattgcgctaagcatgaaaggagggctggttgggcttataccttattcctacttttcgactgagcatttcacagttttgtgtcatcagaggaaaacgataactgaagtatcagaacatagattattccagctgttaatgatctatattagaaagtattcacagcctcaaagatgacatcacttgcctgatgtcagtgattccagcaggagctggaatcatgagggtgcattacccactgctgcctccagggggtgctgtgtgtcaggcagcagagcctagggcctttgaacctggatgagttctgaggtgtgtaatgggttcagaatagtgaccaagttcccatcagccaggggctcatcacccacacagtggttgggtggaaggatagaagccccttctctgcaggatggaagcccctcggaagcacatggctgtcctgcccttccctgcgcgacaccttttctgtgcagtgaggacagaagttcaagttttcagacagagtacatttcagccagagatatcctagagactgaacacaggagggtggggccttaggctgtttggaaggcttgatttgcacaaagaaatgaggaagcaatttgcatctggagagaatgcatgaatgacactgtttaacaggaaggtaagaccacaaggctagcgacccaggatcggagtcgggtccctgctgtctgaatctgcagggcatgtgccgtgtttatggatgatgccttcatcactccccacccaggccatttctcctaagccactgctccttctgctttggggatgagaaagctggggctcagggagagcacagaacttgctcaagagcacagagctgaggagacatggacctgctaaagggagagaggatcccacacacactgccctgagctttggttcctgtttgtgtcgtaatcccaggcacggacttgtggcaggaggtggggtggggagagaggctccagcagggactaggacccctgtggctgtggcaaggctgtgtctccagtaactgcagggcattagtctagaggagacggaggagatggaccccgcactgacagatgcaggggtgaagcctgaacccaacaggcagagcagcccgggcgcccttcaggaatccaggccattaggtgggatgacacagggggcttgggagtcgttagtggaacacagccttgggaatctgacagcaggacattgcagggtttgggaagcagggttcaccggggaggcctgagagcagggagggctcagggcccagggctggcttaaagtccagggagcgaggctgggtccactcatctggatgtgggctcaacatgaggaccaacttctgggcaaggcggagtatgcagggagcagggggtgcgaagtgtggccaggcagcaggaggcagccttctctctctcttgcctaaggtatctgatgtggaactgattcaaggaagtgggaatgttggtccaggggctcggggtggtctaaggcaaggaggtccctagcaggcactcacaggagtcatcttcctccctgagtgtcctccttcatcagcaccctaggcactttctagaagctgagcagggatgctgaggtaggtatctcagtggagcaccacatccacgaagccctgtgccgggcgctgccctgacagtcctgtgctttggaaacctgggcttgtgtgtcctgagccttgctgcagagaggacttggtctacaggggcatctgtttccccaccggtggatctgtctctgagaagaaaagcctggattctgtcatctgaggacagcctaacagtgaggaattggaggagatgctttgactcataaaagggaagaagtagctgggacaaaggcagaatggctttggaaaatacttaccgcttctgtttgtaccctgtcatgaagattgtctcgtttaatcttttttttaaaatgattttcttgagatacaattcacccatttaaagtatataattcaatgatttttagtattcacagaaatttatgaccattaccaaaatcaataatattagaacattttcatcacctcaaaataaaaccctgtaaccttcagctcttacccactatccacacccgcatccctgcctcccagctctaagaaactactcatctactttcgatttctatagattttcctgttctggaatttttcacgtgaataggatcgtataatatgtgactttttgtgactggcttatttcatttagcaaaatgtattcaaggttcatcaatgttgcaggttcatccatggctcactacagtctccacctcctggactcaagttcactcctttttatggttgaataatattccattctatgcatatgccacattttgtttattcattcattaactgatacaaatttgttttttttccaccttttggctattatgaataattctgctataaaaatgtctgtataagtttttgtgtgaacatacattttcatttctcttggatacatgcctaggcatgggattgttgggtcatatggtaactctatgtttaactttttgaggaactgccagttttccaaagagactgtataattttgcactcccaccagcaatgtgtgagttctgatttctccacaaccttgaaaacaattattatccaactttttgatcatagccatcccagtgggtgtgaaggggtatctcattacagcattgatctgcactgcctgatgactaatgaagttgggcatcttttcatgtgcttattggccatttgtgtatcttccttgcagaaatgtctatttagatgatttgcttattttaaaaattaggttatttatcattttattattgagttgtaagagttttttatatatgctagattcaagtcccctatcatatacgtaattagcaagtattctctctcactctgtggattaatctttcactttcttgaagatgtcctttgaagcacaaaatgttttcattttgatgaagtccagtttatctaattttgccttcattgctcttgatgtcatatctaggaatctttttccaaagccaggctcataaagacttacccctatgttttcttctaagagttttagctcttatttttaggtccttgatccattttgagttaagttttgattatgctatgaggtaaggaagcaaatttattcttttgcatatggaaatgcagttgtacaccatgttctcatttaatcattacaatccagagatatcatgagcctattctttaaaataaacatctcccttttacatccccgctttaaggagtcttatggggagatgtaaaatggagatgtttattttaaataataggttcatgtgattgtgggagctggaaagtctgaaatctgttgtgcaagccccagcagactgcaaattcaggcaagagtcgatgctgtagtcttgagaccaaatttgacagggcaggcagctggctggtaactcagacagggtttctctgttgtagtcttgaggctgattgcttcttcctcaggaaactgctcatcaggccttgaactgattagatgagacccacccacattatggcggataatctgcttcacgtacaggctactggtagcaaaagtgtatcacatccactaaatactttcccagcagcatctcaactagtgctgcaccaaacagtttggcaccatcggatagtcaagttgacataaaatcagtcatcacaggtagtatggttgccgttttttaggagaagaatctgaggctcggagaggttaaaagatttctccagaagcacagtcagtctaaacataaactggattatcacgtgctgggcgaggagtcaggaaagggaaatgggaaaatgttggtcaaagggtacaaaggatacataaattccagaaatcttctgtgtagcctagtgactgtggttaataatgctgtactgtatacttgaaaatcataagagagtagatcttaaacattttcaccacaaagcatgtagggtgatggatatgttaattagcttgattcaatcattttgcagtgtatacacaaacatcacatcgtatactgtaagtatatgcaattttatttgtcaatgacatctcatgaagctcaaggataaaaacgacacttggaccggaagctggctcctcaaggcactccgttcttatgcccatattaagcctctctgttctgagaacagtccaggcttagggagcacttgaattctcagaactccaagtaggttccaggaaaaaataccatctcattgatggcagacacacacattgtgtgaatgactagagtttctctaaagcatacattcctcctctcactgtgcctgaactcttagtcacagcaatgtggggtgccatcctcgtttaggaaagttcttccatgacgtggcctctctgtttgtgtttcttcctgctgtttcccctaagcccatcagacgtatgcgtgtgtctgaactccagcaataaacaggcattaggatcttttccctgagagccgcgggcacttggcttgtcttcgggaggctgtggctgcctggcagacggagggcctgggggtgtgcgcgcggcaacttccaactcaggtatgactagaaaggccaatggcactaggagagtgtgggaaagacaatgaagagaggaaggaaaaaaagaatgaggaacaaatgaaggtttcaggtgacagagaacgccgtggctcaaatgttttcctgagcattacacacaaagagaagcaggcaaggacagaagtgcaggcttcccgagaacctgggaaacatttgtgtatgtggcactttgtggatgatgagcaaggacccagtgatccatgtctcctggctgtgaccatgcagccagtatgtgacctggtcaggatttgaacacaggcagggccaaccctccctccgcgccctgacagccaccctgctgtttccagttggcctctgctattggctcctgagctgcccctgactggggatactgcataacatcgtccagtaccctagtactagttacacaggaacaacaggcgttaaccagaaccatgccaggcaaactaggatgatggtcactgagccagaggaagaggtggcccaaatactgcctagtgggagcattgtccagagaagggaagaagaatggtccagcactaacatagatgaccacaaaaggtgccagaggttgggctgcagcatggcctccaggatttgagtgtgatgtgggggtactgagtgctcacacactgcccacctggctcacatgaggtggtcacacctcgggcattgtcggggatttgaaaaatgtttgcagcttcatgtcttttgggctgggtctcccttcattttgtgtccactgctgagcctcagagtgcccggtccagtttggcctggggacagtctgttgcttccaagagtcatttccagggtcagcttcattttactgatgctgagacctccaaatgcccttagtactagggatgtcaccccccaccaaccgaggagaaatgtcaatgctcaagttcagaacaccaggagactgggaatgcagatggactttgagacctctcttccctagctttctgcctacacactctcctaagagctaacaggtcagtaagagacatcaggcatgaagatgtcagtgcaatggggggacaaagtcacccagaaccacctactctcaacaccaactcattcacttccattcttttttccatgtatggattttacaaaatcacagaagaaaaaaagaccattatcaattaagtgacatgtctttttgacattcttcttcctgccatttgctgtgtgtctttctggtccttttatgaactacttccttatatataagcatatccttggaacacagatgctctgtgggtttttatgtatgtgccagatatcacatgccactccgcaacatgctcgttttgctcagcactatatttttgatatgtagtcatgtgggtgtgcatcaactaggatgatttttaatggctctacattatgtcaccatagccatgtatcactctttagtcagttcttcactgactgatggatatttggtctgtcacagttcgggtttccagtgaaacagacagagatgggactggctgcaggaagcatgccggtggcaccctagggagctgcacttgtcagaaggggagggccttggactgcacagagagaaggaaagtttgagagtgatgcagctgccatggacctcagccaattccaaggggagtggggttgtctcttcaaagtcaccccaaattgaagccagagccaagccttcatgccccctatgccattctcggatggagattgtcctcagggacgagatgagacctgggcaagttgctccctataggctattgaaggcaattccaggggaaggggtcctgatctgggcaggtgctcagcacccactatgaggccatggccagcctttcatgattgcaagtgatgctccagtgcttctctctgaagtgcctgtttgctcatgtgcaagcatgtctccagaacgggcgtaaataaatggagtttctaagtgtttcatctctatttgatgctgctgaattgtcctccaggatgactgaagccatgacagtcccaccagccactgatgatagtgctcattcctccccttaccagtgccaatatgctgtattgttacatgctttcatttttgcaactctaatgaatatagaacggaatcttgttatcatttccatttgcttttccataattataaataaggctaagcacacacatagacaacactctgatgcaaattctctcttctacttctgactttggccctgaatgtaaaccacagcatcctcagacacagtttcttctcttcctttctttctgcctcagtttgcccaagaagagagtgtttcctctgagccttttagtagtttcagaagttgcctaatgcatcagaaagtcctgttgcatgcatgtgtgagcctgtgtgggtgtgcacatgtgtggtgcacatatgtatacatgcacacatgcatgcatgcatgtgttaatgtgtgatgtgtccatgtgtgcacacaggtgatgtgtatgtaatcagtgagaagtttctgttaaagagtcttgcaatactcatactctttgaaagaggaatcttaactcagagcctctatcttaaaaagtgtatgaaatacggaaagattgaatatattaagttataatgtaatatattaaattatatatggtgtgtccatgtgtggacgtgtccacgtgtagtgtgtggtgtgtccacgtggacatgtatatccagctacgtgtctagggcgggtatgggtgagggagctgtcattcctggtcaggctctgcttcaattcaaacctgtgttgtttgaggcaaagaggctggtatctggggtgactgaagacacacacagtcttgttttctttctatctcctgctgcccctcagctgtgtgtcccagtgacttctggagaaaaattggatgctctgtaaccctaccccaaatcaggtccaggaagaaagaggaaggaactaaccacagttcattcaattattctcctattgttggtcattttagatagttttctgtttttcagtatgaaaagcaatgttcggttaacatcaaattatactaaattaaagctaaacttattttttaaattaatttaattaatatactgaatctttccatattaaatattgatttttaagatacagacttggagtcaagatttctttttcagagagtgtgagtattggaaggctctttaatagaaacttcttgttgatctgatcttcattcctttggttagtagtaagagcagctgccttccactgagggctcagagcatgccagtgccaatgcctgcgtacgactagcatctgtgtgaatctcatcttcccatctctgggctctggtcagaatttgtgtagtagtagtagtcccagcttcttgggaggctgaggtgggaggattgcttgagcccagaaattagaggttatagtgagctaagattactgcactccagcctgggcaacagagcgagaccctgtctcaaataatcattttgaaaatcaatgcagagttgtcacaattttattttgccaagtctgaacattattaaaataaaccccacaaacctattacctactgtctctattatttcataaaaagtaggaagatatttgaacactcctgaaactgtatttggcttttacaaacaatatttcattgtcttcatttttctcactttgatccagaaagtgacccagcccctggcgcctggttggctagaaccctgtccatttctgcccaagcctaaccccctccaccctccagggagatggctcatatatcacggctctccaggaccaaggggtccctggagtcagagcagaagctcatgggagggtgctgaggagagacagattttggctcaggcttgagaacatcctcctgataaatgggcgtgttcacatgaaccaggctttctgggagagtggtgggaggctgagccagaagtgttccagggaagctgaggccactgctgtgcaggtttctgcctggagtaggtgctcttttccaaggttcagattctacaatttgtaaaggaaaagaaaaatgttctgaaggtttgttcagtcctaccctgcataaaccacctgtgtttcccgctagcttgaggtgtggcctgccttgggcatggtttccttggtgcttcgggagaaggccagggaagaagtggcagcagttccgacccctcccccaactcgctgctgcacggatatcacaggctggcctttgaaagatgagcagtttctctgaccttggctgacacactggagaagcctcagggcttcctcactctgcacctggggaggcaggcagggctgttggactccctgggcaagctcttagcagcaacgttcagattcctgtcttcccaggaccaagtcgcccctgaggcctgaaacagctcccaagtatctctgggacttgagaaaccaagatgtcaccccctacatgcatttagaattggctgatcgttggtggagctgagtgcagaatgaaaacatgggccccttcttctaaacttattacacatttcaagatggcaacagcagaccattaaaccaagcgcagagcctgagcgcctagtgggccacacacccgagcctgcgagaactgtagcattctcggagccaggccccttatgggtgaaaggccagcatggtcctactggcctctcctccatctctgcactgtcacagctggaggccaggcctgctgcagggcttgtcagggaagggagtgcacccccagatgtgacagtcatccgggctccgctgctgtgtgcccagcactacctcctccacctcccttcctcatctgcagaggagcaaacccacctccctgagggctgctgtaaggacccccagagatgatggcgtggagccttccaggtccaagcgggcctatcttaggggcccagaataagaggccccaggggcaggcatagcagaaatctaaggaagattctgaggaggagctgacatccagggcagagacagcagatcagaagaaccagatacggaaccaaagccttggtgcccaacagggaaaaagagcttctgagttcagtggggcggggcctcccacttccacctgcgctggggagttaagccaggcttgaaaaagacaaggctgcacactcccaaaagtactgaccagggattcttctcttccaattctggtagaattctgaaagcgggacagccccagtgtttagtgacctgctaacaagacctctccttctcaagtgagtagtgccctacaggtgccaggctgaccagagattctcacactggcggggcaagaaaggcaatgcccagggagggtggtccctaggtggagaagagcctagggaggggagagtccagggagggaagagtcaagggcagagagaacccagggagggtagtgcccagggacagcaatgcccagggaggagtgatcccagagagggcagagtccagagagggtggagcccagtgtgggtggagaccaagatggggcagcaccctggtagggcagcattcgcccaggagagcatagattgtgtttgttttatcttttttatgccctcgttttgatttttcctttcagtgtgactttaaccttgacactgaggaaagcaccaggacagtagtccatacagtagagagaatctggacttggtgtcacaaactggagctcaaattctggctccagcagttgctggcttgtggctctagcaaagtgtgagggctccaagtgcttctgtctcctatgtgattgtaaaaggtaggataaagactcctactcatctgctggttatttagaggcactggaggcagcgctgggccagggctggtgctcggaggtgctcctggcagcctctctgcatccccattgtcttactgtctctgtctctccatgtgtctcgctgctgctttctacatggcattccccagcctctctccacttgctgtggtacagaggtcaggtcacaatgaggggcagaggacagcctggctatcctgccaactcagtgtatggctggggacaggcctctggctttgctggacttccacttcttcatccatgtgacattgagaagatcaccatcctgatggaatgcaagggaaatacttcaggaaacattacgaatgcagccttgaacgtggcagtcatcaggcagaggaaatttgatcacaagaatcgcccagtgacatggaggccagggaacatgtcttgggtgtttccttgtatgttctctcactgcacatctgtcaatcatgttggccctccaggagtgaccaaggtgagaggcacacaggccttttccccaggggactcaagacaagatgtcagcagctctcagagccaggccaatgatgaccgtgcaggaggaatattgtggccctcctcagagccagagaggtccatcaggagcatcaggcgggggtgggggtggtggcactgtagctgggacacccagaagattggttggagctatggggctgggattggggccagcaaggcagcccccgctgtggggtcagagaacaagaaggtggtggtaggctggagaggaggggaggagttaaggattgtcttttagggcaattcagggccagcttctcctgacgtggggaggtagaggaaggcagggaagtaagtgtcatctttgacttgcaaacctctacacatagacgtcccaccccctcacacacaaaagctcatacacgagcactccactcaccccagtgtgcacacaccacatcactcaccccgctcagtgtgcacacaccacgtcattcaccccagtgtgcacacaccacatcactcaccccagtgtgcacacaccgcatcactcatcccagtgtgcacacacatcactcacccccctcagtgtgcacacacatcactcaccccagtgtgcacacaccgcatcactcatcccagggtgcacacaccgcatcactcaccccagtgtgcacacaccgcatcactcaccccagggtgcacacaccgcatcactcaccccagtgtgcacacactacatcactcacccccctcagtgtgcacacaccacgtcactcaccccagtgtgcacacaccacatcactcacccccctctgtgtgcacacaccacgtcactcaccccagtgtgcacacaccgcatcactcaccccacggtgcacacactgcatcactcaccccagggtgcacacaccacatcactcaccccagtgtgcacacactgcatcactcaccccagtgtgcacacacatcactcatccccctcagtgtgcacacaccacatcactcaccccaatgtgcacacaccgcatcactcaccccctcagtgtgcacacaccgcatcactcaccccagggtgcacacaccgcatcactcaccccagggtgcacacaccacatcactcacccccctcagtgtgcacacaccacgtcactcaccccagtgtgcacacaccacatcactcaccccagtgtgcacacaccacgtcactcacccccctcagtgtgcacacaccacatcactcaccccagtgtgcacacaccgcatcactcaccccagggtgcacacactgaatcactcacccccgtgtgcacacacatcactcaccccagtgtgcacatcacatcactcactccagtgtgcacacaccgcatcactcaccccagggtgcacacacatcactcaccccagtgtgcacatcacatcactcaccccagggtgcacacacatcactcaccccagggtgcacacacatcactcgccccagtgtgcacacacatcactcaccccagggtgtacacacatcacttaccccagtgtgcacacacatcactcaccccagcgtgcacacagatcactcatcccagtgtgcacacacatcactcaccccagcgtgcacatcacatcactcataccagcgtgcacatcacatcactcaccccaatgtgtgcacacatgactcactccagtgtgcacacatcactcaccccagtgtgcacacaccacatcactcaccccagtgtgcacacacatcactcaccccagtgtgcacacacattaccccagtgtgcacacactgcatcactcaccccagtgtgcacacacatcattcaccccaatgtgcacacaccacatcactcaccccagggtgcacacacatcactcaccccagtgtgcacacacatcactcattccagtgtgcacttcacatcactcaccccaatgtgtgcacacatcactcacaccagtgtgcacacacaccactcaccccagtgtgcacacacatcactcactccagtgtgcacacacattactcaccccaatgtgtgcacacatcactcaccccagtgtgcacacacatcactcactccagtgtgcacacacatcactccagtgtgcacatcacgtcactcaccccaatgtgtgcacacatcactcacaccagtgtgcacatcacatcactcaccccagtgtgcacacacatcactcaccccagtgcgcacacacatcactcactgcagtgtgcacacatattaccccagtgtgcacacactgcatcactcactccagtgtgcacacacattactcaccccagtgtgcaaacacatcactcaccccaatgtgcacacaccacatcactcaccccagtgtgcagacaccacccacctgcatccacccagtcctgagatggctgcctgcccctcccctctgcctccttaggaaggggaggcccaacccagtggggtctggagggtggggtaggcagggtatgagtctatagggtcctccagattgggtctcacattcaggaggggctgcaaattagacatttgactttatttccgagtgaaattttcaagcaggcacagaagcacaccaccaggactgaaagaagatgctcaacacccaacttggaatagcattgtaacactacactgcccggcatgtagcaggaattcatattttctataacgccagtaattaaacaagaatgtttcgttgtatttgtgtgttaaagttgttcattggttccatgtaaacatttaacataacgttttccccaccccccactttttcttaaataaatgggagcttcaaccacggggagaggccctggcctctctaagcctcccctaggccctgctctggctggaggtcagagggccataggtgcactcttcaccactttcagactcttcctcataccgccccgttccatgtgtggcctggagagacagaggagagggtgaaacacagagcaaatggaagccttatcttcccttgtgttcggggaggctgagtctggtcccacagtccgagcccaggcggggtgctgggatgcacgtgactcaagagagccggcaaatgcaggcagagccagtgatagccgataaggactgcagctcttccgaggctggagaggcctcgcccaggaaggctggagtcttgtcacttaaggacatgtcaccaaggaataaaaatagatatgtttcaaagaccaaagccagagcacatttaattccaacaaattcaaatccaggcccgtctcccatgaggttgtcactggggggcaccctgggcatggcatgctggtgagctggctatgcagagtaactgcagaggtgctggccacaggctgccccatccctcaggggaaagtgtgcccggccctctcaaatggtcacatggtttcagtctatggacagtgaatggccctgtgtgcaccactggccgtgggagcactgcaccagggggtcacaataactccagccacagtgtatcatgcagcccacagggctgctgtcctgacctctctctctatcctgcagttggcctggggttatttttcagtgcctcaggggtcatattaaaaagcatgtggccgctgagtgagcactggcaacagtggccagaccacgccctgtgtgtgacaagcagcccagtcacacctgtgactgatgggcctcagcctggcctggcctcaacactcctgggctcccaatgtctcactgctctttagctggagaggacctgctaaactgcagcagggcacttgggaagatcctgggctttggtgtcccacaaatctgagttggaatcatgccattgatcaatgctacttgatctgcctgtgttttatgtctctaaattggaagccatgcccctccaactgggttgtgggaaataacatacaatgatgggtgtgacacgcggcctgctccttccctctactccccaagggttttggagcgagctggcctcctccacctctctaacttccatcagtctctgcagtgacctgcccgcctgtgctcctctggctcactgctgttgttttctgctgactatggattatttttccccctgtctccttttcatcacctccttgcatcccaacaaccctcccaggctttcctgttgtgctcaaatccccatttccttagccttccctggcagttgagctcagcggtgtatgctttgggtggggtgtggggagggagagcaggctccctttcctcctccaggctggcatgcagattgaatcagtccttgttgtgcccaggggcatgcaggacctctcatgtggagcccctttggcctgcctccccagccccgcaggcagatactacctgcacccacactctgccacgctcatgccctcgtaatggtacttgagggtgggcacccccatgtcatccttgtagaggacggagatggggctcagtttggtgggcacacagcaggccttgcccacctttgtggggaacttgagatgcaccagggtctgcacgatagcgtgtttcgtcggcgtcacatcgtcagccaaggggaagaagcagccgcccttacactcgtaggcttcatactccttgggtgcaatgatccagctgtcccagccgatgtcctcgaagtttacccgcagggaggtcttttgacagtggctgccagccccggcgctccttttccgcctggctaaagtcgaccccgcagccacgtggccatccgtgtcctcctcgtgactgctctcacctgcctctgtggagccgtccttggacagcttcttgagcacgctctcttgttcatggctgatcatctccctcagctccagcctggtctccttggtcccactgctgtggtcattggagaagacaacaaagaagggcaggtttctggaacctggggggacactgatgtccagcgtgtcgcagcccttcctgtggctctccacagtcacttccagcttatttttgctcttggtggagtcggaccggacccagcgcttcacggcgctggacacttccaaggtctcccagccctcatcctgaatgtcctgggacaccaggaaggtcttggtctctgtagcactatcccaggcatctgttccatccagaacatcataaatgaccacgcttcctttcaggtcatgagaggggtccacgtgattttgacaggagacatagagtcggagctcagctctggtgatctgctcatgcctaggaatggagatgttgaagagcaagatgtgcttctggaaggggaagtcctctgtggcagttatggagatggcatctgaaatgcaaacacacgtggtgggcatctgctggagggtctgtttccatgacactgaagctgagtctcagggtttagacagaagagcatctgggataacaattttggtctgtattatctctatttggtttcacccaagcccttaaagtataagagtattttgaaaggtacacttaagatcttccaaaggagatgcctccaattgggattgagagttcctactgtttatcgagcatctactatgtgccaggcattacactgggagctttgcagaatacatttcaccttaatcctctcacttaccctgggaggatctaattattattccacatttgcagatgtggagactgggattcaaggcagttaattgccaaaatgcatacagctagttaagtattctgggacttactagcacacagctattgagtacataaagaaaacagaaaaactcactgtcagatcctgagtgaagatcctgagtgtatgaatttaaaggagagatcctgggtggggacagtgaaaccccaatattaagacaatatcaaaaatctcagcctctaaacagtgtataaatcgtttgaaattgtaatttccaaacaaagcaaaagtggataattggttttagtgtttcaggaacaaaatctattagcttcaattgctttgtcatgtcaagcaaaaatggggcttggcttttagccacatagttatctcgatatcccatttatcctgggctgacactttgtcattagcacgctcctgctatacaatggctggttcacagacagggaaaagaggttgcattttttcagcacttgctatatacccacatgtgtggagaccctgtgctatagggaaacctagctggcaggttttgaagtgccagtcctgcctctgcagaccagttaggtctggcctgggcgtggtatggagccaggccccttagccatttgcaagtctcagacccaggaagggagaggctctgtgctcctggacattcagagggagacagcagcagcaggaaaagccagctctgcaggcagacaggtttaacacttcctaggtgtgcaggcttaacacttcctaggtgacatgggtgggtacccttggtggctgcaagctttgactgaacagttttgctcttcagaaacttatttcccctgcatcatgtgagcttgtctgagttaggacataggtcctaggtccgtgtttgttatcttctagtccttctaaatcagatatatttctatttaaaaacaattaggttctctgccaacacttctctgtccaagaattttatctgatttttaaaaccgtttcataagaaaggaatagatgtgctttgaaaatttaaaaatatcccagttagttggaggtgaaataggttgcctgttctgttctgaagtaggaaggggacaggaagggaagggggaaaggaagagaagtgaatcagaggggagtgatgcaaagaagaggagagtaaagagaaggggtggaaaaaagagagctggcatccctgtgcacctgctgtgtgaaatgtggcacacagcttggggaaggtgaatccttcacaacagaagtgctgagtagaactctcagtaaccatggaaatgttcttcagtctgcactgcctgatagggaagccattagccacgcatttgaaaggaagctggtgaggctaaagaaataagttttaattttatttcattgtaactaatttaaatggaagcttgaagagcctcctatggccagtggcctccaccctggggaaagcagctgtggacctgtgagtcccaccccagcgcgcatggtgcaagcggagaccctaccttccatgctgaagctccgcacaatgttggacgctggcgtagtcgacttatcggacgtgtacctgttgtacaggtcaatcatgtactgcggcggctccaccctggttttgtcctgcgaagggaccccactcaggttaaggctgcgcaggaaatccaccttcacgttctccagaaacatcttcaggttgaaggtgtgctcaggcagcccacctccaggcacccccagtgggctgtgggcgtttcccccagcagaccctcgtccccagctctgcagtggcttcccctgtagggagccagccagcagggacagcaggggcagggccacccacagtgccccaggacacatcttaggcccgcgcaatcacccagagaggagactgcaggcggccgtgctgtgttagcgggcacggggaggagctgggaaggagcgggccggcatctccctgctgtttgctctgaaggaaccgtcctggccagcacccactctcacccgctgccgggctggattgtcctccacttgtgcttatctggtcctcgatgccgcgctccgacgtcttatctgagggagccttccgttaatgaaggctctataaacatctgacaaacacacagggcatgcgggaaggacacggcctactgtaaagaatctgtgcttctccagggggttattgccccctaattaggatactttctcatttccttgccagggctcttcagaagaatctccaggcagggtgacatatgctccatctcctgggccacaggagtgaagaatccaggaaacaagaccaagtagtcctccaaatatagaaaggacagcacaagatcacagtgaaccgtgggggctggggagatggggagagtgtggggaccacatcagggctcagaagaggcctgctccttgcagaatcggaacctgccagcaagcctccctgctctgttggtgggatgcactgctgagcattagagatcacgagtgaatatggctcccgtgcaatttagtgcggtgatgagtcaaactagacacaggctgggatctcaactccctcaccgattccctgcaaatgtcacctggaacaagtcactgcagctcttggagcctcccattcagaagatagttataggggttaagaggatgctgtgccccaggctggcttggtggctgcattctggatgccccctctccagcccaggcctgattgagctggagctgggggaggaagccctgggttcccccagcctgctctgtcggagctccacaacacactgcagcctgtggggagctccccacatccctgcatcccagctgtgtcactggtctgttgtggggtggtcttagctcacaccaacctggcagccacctggcccacactcatcagcagggagaaccacgcaatctggtagacaggggagtaggtgggttgttctgagagtggtacatgccaagaagatgatcccctggcctttggaggctgataagctgtggcccaggaaagggccccagggactgcgttaagagcagtatgtccacacttagactctgtccatttccatcacgtgtggctttgagcaaagcaaagaaggatcatggttagaaacactctggggtatgctgtgcctggtggtttactctggggaaggtattctatgctggtgaggctgtccgggagaggctgcagagagctgagcaggtttaggggggtgcaggaggggccacagcatgctgcggtcagagattgcagagggggatgggtgaaatcaggagcccctgaatggctgggcctgaatagaacttgctatctctgtcctttgatgacatgggccaggggaagacgggaagcgtgctgcttcagaaatgctgcttgggaagaggactggaagtgtgctgggctttgatccagctcagtgcaagaattccatggggcagagaaaagatgaataaatgggtgccatgcccaagaaatggagctgcaaatgcggagtgaggtgtggtccgggaggagtgaggacagggcagatgcctgcaacatggtctggccaggagcttttcacacacgagaggctgagcagagggatagcctagtggcctggatgtgctcagggaggagcaaggggctgctacctgacgttattttttaaatgtgacatttttttcccctgttataacagtagtctatagtatagaaaacttgggaaatggaaaacattaaagagaaaataaataacctacaatttaatcatccagtgatgcccatggttagcattttgagacacatccaactccacaatcctatatctgaaaccattgtggccaggattgtgttgagactccgacagtttcagatttgggggattttgtattgtgtatatgcaataacattcccaaaggggtcagagacaacaccttataatgacacacatgaatatttctgcagtgaaacaaataaagacacaaatgtccattcaggtcaagttttcccagaaaaggaattaaaagaaactctaggttctcagatggttctttacttggaggtctcagatgaaggactatggacctgactgtatccagggtcatcacagctgcctgtgggtgctggccacacagactctgacatgggtgtctttccctggagctgtgcaatgcaacatgccggtgtatatctgaaaagatttgcctcacaaactcaagatatcaatatgttcacatctctttcattgtattaaatggattgcttgaggtttcctgatccatattatcaggaagtctagtcttctccttttctgaattgtccaagtgctccatgggtaaattaagtccaaaggagatagggtatgaaggtgttagtccagcttcttcatgctgggaagcgggagggagagaggggtcccacctgctgttgcttctcaacaacactggctttgctgttgggcactggtcctacatgtctaaacggctgcttgttcttagctgctggaatgtcctctagcccaggtctgtggggtggcccccatgaggcaataaggtaacagtgttcttagacgtgtgccgggcttacccacctccagcatgcgtgtctctgtggccagtggctgggtgaaggtaagaggccagttatggttaaacaccgattccaaccagccctttctcaaatctgtaggctcttacggggggcctaggtcaccagcgggactcccactttcatcaggtggtgatttcagggacctggttaccttttcatacaaatggaccctggtccatctgagaaaatccccctaactctgggtcttagggaacaagtctcaaacttgctctgattttcccaggaggaaacagaccctggatgttccctcctgcagaaggacccctccctctgctatcaccagctttgcattgttggggcctcaggaaggagctgcctcacttgaaccacagaaggtcttatttatctctcctttcccccctcttcctccaaattgtgtactttctaattcttcaccgacttcccagggaagtcagtccacatgattattcaaagactaacgatctgaattatggtagtcttatgtgtctatacctaaataaagcaaagactggcataaaatttaagaaaatctacaccaaagtgtcttcagtctctgccttaggtttactttcgaagccacttgaggtatacatggtttgatatatacaggcttgcttctctttgacaaaaattttttaattaaaatttttaaaatgttgtcatttggattccttttgtcacaggttgcagaaaagcagaatccaaacaggcctaagcaaagtggattgcacctgactaatgaaaccttcttggttggcaacggtttggctttagcgtggcttgagctacagtacaggcaaagttctagccatgctttctcctctctcagtcctgccttacactgtgttggcttcacgctccatctctctgtgtcttggcaaggtggccgctcactgcagccggcccgcatccctttcaaatgggtagctaggtggggtcaaggaggagcaaaagcctcttttccaggaagtcctagggagtctcgtggtgtctctctgactctgattggataatctacaaacactccagccaatcaccgtggctgggggaatgcaatgtcctgaatgtcctgattggcttaggaccctgggatgggcgtggcgcagacagcacagggagagagtcaggttggcaagaaccccagaagggtctaggtctgggcactaggaggaggtactgggaaaggattgtgtaaataccttcccacttcgtgaaaagcttttcatgaacttcatttttttttttttttttttttttttttgagacgagatctcactctgtcacccaggctggagtgcagtggcatgatcatggctcactgtagcctcgacctctctggtcccaggtgatctttccatctcagcctcctgagtagttgggaccacaggcataagccgccacgccagcctaatttttatatttttttatagagatggggttctgtcattgcccagtttggtctcaaactcctggactcaagtgatctgccagcctccactacacaaagtgctgggattacaggcgtgagccactgcgtccagcccatgaacttcatttttaatgactaaacattttccagttctatggacatatcttaatttagtcaaatattttccaatggtaggacaatcaagactattaagataatgttgcaagacacattgtcgtacattgttatagtgtatattttgtattattttattggacaggtcattggaagtggaatatctaggtcaaggtatacataacatttgcaaagctcttggtaagcattgctaagcggctttccacaaatgctttttaaatattcactctcagctgagcctaagaactcatcttaccacactgttaaccaatacttctttctaatccttggcaaattaatgaacagcagcaacaaaaatgctaatttgcattgctccttaggctggactatattttcccccacttttttcaggagacaaaccacaggatctgggcttcagcctccaaggaggtatagcagtggccaggtctcatcctgtgctagtccagggccgtgctcaggaatcacatttgttaccgtgctgtgagtctagggagagggccagagggcaccacagattcctgggtgttccacaggaatatggcccagggtaagcatgcaataactagtcattagtattgctcctgtcagtacatgatctttctgtgactgtttctctctcccccacccctgggacagctctgcccttcctttccatggagctgcagagggagctgtgctcttccaccaggaccacctcatgtcccttccccctgtcctccaccagggccagttctgactgccttttagtacctgcctaggactcctgcaccatgcaacctctgtgttccaagaaacagttggattcatctaacaaccactaaagggccccagggctgctcctctgctggcagcaatttgacatgcccagtgagcctgccgggccttcacagccagccaaggctcctccagggcaggcctcccatgctcgtctctgcatatgtctttgaacacctcggcatgctctgtggtgggtgctagtcaggctgggttctgccccagtggctgccagcttggccctgtcctcctgtctcttctcaatacccagacggtttcacatgactgtgctgttgttacttttaaccaaaacctcagtagggtcacaaatctcaggacttgtgaattacagaaaccatggcatcactgcaattggtacggaagaagcacaattcaatgaacaaaagaagtaaacttgactcatccatttatttcaagcatccttgaagcccgttcctccaaaaaggtgacattgacctcagtgttccttcatggagggagaaaggattcacctgagtttctgttacaccatgactccagagcatcagggaccccttccctcccaggagacatcactaaaaaaacctgttctcaaagcatggccatggagccagcagcagcagtgcctgggaactggatagaaataaaggctcaacctgaatcagaaacaatgctagggggcccaactgtgtcaagctctccaggcaactctgataggcattttgcacagtggttttgacaaaagagggaactcataagagccttccaagagaaaacatatgaatacattgcctagcatggtatttggcacatagtaaatgctacataattggataaataaacatatttcttctccatctgacccacctatccctgacccatacaaacaagcctgctgggagatgctagaggagcatggcttggggttgggctgagcgtgagtgagcggactggaggcaggatagatagaggattcatggacattattatctcagggagcagagagaaggggaatggaaatcccagaaacacctgtgaaggatcttatgtttccaggttttgataaagggaaatagttttgaactctaatgttggtgttttggtgcacaagtcacagccagagctggccagctggccagccctcctggtttctcactgacactaccttcaagccctccctggcatgcgctgctgcagacgctctttgtgatgtccttattccaccagccaagcccggctctttcgtcctgcttggtctcaaagtcagcctctttgtggagtcgtctccattcctcctcctccagagtctcctcctctcatcctccccttcccacctcagacatgcataagttcctcagtcacagctttgtctccatcctggccacagaagaaacatgagttataagcttctgctctgatgacattttatgaagtcatagagaggcacctattgggacaccccaggcaaaacacctggtagtaccaggactcaagtctccccatttctcaagtataaaggttgtattggaagccttctgaagttttctcccagccctcaagtttttagctctcaatggtactatttatgtttgtcacatgaactaatctataagaggccctgcccttctagaggatgtgtaaattcagagatgcggcccagctgcaggccaccaccctgctccctccagaatgaaacaggcccagttgagtgacatcagcaaaccgtgtccagaccgtatgatggaatcttttgggctcttatgacaatgtaatgttgacattttttgttttaagggaaaaacaagttatttcataaacatatttctttttaacctcactttactgtgtcccaacctcagtgttgttgggacaatcctagcagactggggatcactggccaggaagttcagggtcagtgccagtcatgtaggccttaaatcaggcggccttgagcatcaaacttaatgttccctgtggtcttggcaagacatcaatggacatgttacttacccttcctgagcttgtttttctgcagctccaattgggcagtaagttgcaaggctgctgtgaggctaagcaagatcctgtaactgcgtggtcttctatacattggaggggtcactaatgataccagcttctcctactgtagagttgggacatgtcatgtccccagttgggacctgccccatttcacattccaaggtcttcagggcatgcccaggaaagatggcaacaactgagcaccttccatccaggcacaggcctggaggccatgcccacagctggacccagggagagtgtcccagcctgccctccccaatcccagtaagccagacatgaggactcagaggcattccaggtatttggggggaatccagaaggcctcccagaaactgcaagtgctagaaagaataagataaaactactattggacagcccatgtttagcaaaaatagaaagggggcagttgaatgagaagaaaatgagggatggaatattcagaagaaagggacttggagttttattaagccccaatatttttacttattttgctattaacttatatcctgtcatgttccaaagagaattagacatggcaaaccaagcactaaagtgcaggccagtttgcgccagcccagcaacctatagcagcttgaagggaacaatttggtcccatgtccagttcctgtgggagtaagggaataaggtggtgagtgtggaggaccatcccaccactcccctgacctctgtcagcaggcagggccatgtgcccagcaggtaggggtccccacggcagctgctcacgcatgtgtcccagggtcacttggagcacctcataggagatgctgagcagaagctgcggagcttcaccctggcaccctcgcatccccctcacctaccagttctggctaatcattctccagtttcaatggcttcgcctccaggagttgccactcttcggatgctacctaggctcctggaatcactgtggctgcctgggcagaaggccagggaactgggactttacatcgcccttcccagggcagccagaagccaagaggccctgaacacccagctcccttgctcgaggccacactgccctgaggagtaactaagctccaaagctccccacaggattgctcccagcctgcttttctgcttcacctcacccttgcccatgtctcctgagagcacttccccatatatcccttgcacaggaatcctggtctccagagcccagcctaaggcccaagacagacaccagagctgcttctctccttggacatcccctcttagaaaaccactatggctttgcagtttcctctaagacttggggccacgtcatctgtaggtcccagctgatgggactgctatatatacacctgtctcaaattggatccagattctctttcagaaatgctggttaagcagcttcaggcactccatcataaggcaatgtaaacgaagggcataagggaacaatttggggtggcttgggtgatccttctacacacaagcaaaagagaagcaggtgcaggagaccacatggcccgtccacttcctcatgagtccttggacctcaggagagacccctacttatgttgaatctcttgctccatgaattaccagaagtaaaagatctctgaccaggcaaccatagatgtttttttaaacaccccaggcacctcccaatcaatccatgtccctgaggctaggggatgaggagaaaccccgagaggccactgtccctgtctggagccatgtccattctcaacatcagcctagcttgggtttgcaggaaccagtagtgggacaggcccctggaaagcatgggaaagcctgggtttctggagcctgggacagacaccagggagtatggagatggcttaggggactccagcgaccctaaaagaggctgagaccccagcaaccaccagatggtgtacttacagatggggagccagtgagattttgaaatgggtgacattcagtttttcaagataccactgtacctttaatttattagctttccataaaaacacataacatacacaatctacagtatagaaagtataatttacaaaaatataaaatcttggttattttttagtattcccacgttactatatgtgttatttcaatatgcatgtttaaacaacccacactcagcatgactatctctgtggggaatggtgtcaacgccctccctttttgttgttttaaaataaaatatatatattaagaaaaagaaaccaatattggctacatgtgcataccatatggataaaagctctgcagtggactttgaaaggaaacactcatttacaccacgattatcctgttttccaaaatcactatgtggcccaaagtgttctgaactgagcatttaaacagagttctttccgtgtgcagggagcgagcgccctaagatttgcatagtcttcttgctcagttatgagatgatgatcacatcaagccaatgttgtggatatgttttgttttcaagccttcagaacagtgggtatgaatgatgggccactttcaggccagggctaattcccagattccttcaggtactcaggctggcatttaaggggctagtcactagcaatgaaagaccccctaatgatgcactggcggacagctctctctgggccccagtgatgttgcccatgagctgtgctctgtgtctgcagctgcaccacaagtcctggttgcagaaggctccgagaaggcagctctgctgggcgtggcttctttccaccctggagtggtctcaccggcaggcacaggtgtccacggacatgttggggtacaccttcagaaccacattccgattctcatccaggaagaggaccccaagggagttcatcttatcgggaacacagcagggctctgggatgccagggatgatgcccacagccctgacaatgctctggatggtggcatggttggatggacgaacgatctgcaaggcagaaaaggagtagggttacctcagctccgccctcacccacccacgcacccatgccatcctcacagtcccaggccatactgctctgctgttgttccccggctgaggccacagaataggcatccacctagaggaatggacgagatcccaaggcggggcacacggttcctctaaaatcagacatacgctgagttccgggctgaggtctccaagagcccccaggccttcctgccctttggcttccctgaggcacgctgtgtccccaacacggcagggccacatgggggcgcctgagtgtcacacatccccgcggagcaccaggaagcaggcagaagctgcccagagggaaaacccagcgagatgccagcacagccctggtctcgcagtctgaggaggacaggcatgcttctcacgaggttgtgctcttgtcactgaagggaaggcctggcatgtgcgtggcagtgtgacaggctggacattgacatttcctaggggctgctctccctgcatcacccccttttttttgtcagcttagcaattttatggggtgggtattacctggactttactgggaagacaccgaggtttaaaatgactgagtaacttgaccaagacccctagttagaaagtgacctggcttggaaaactgtgcccacctctgacaagatgaaccaaccgggtcatccacttcagtgcatcaccagccaaacagagatttgtatatgtagtgctgttgaggaggaagccctcttgtgtgggtgtggtgggaagggagcagggcagggacacctgcctttgcagcgttctggctggtgtcccggaaggtggggaggcagcaagccagggtgataagctaaccgcatggccaaccagctgcaagccttcagggttccgggcttgcatctgcctgggtctttgctaggcccttttagcaggctccgtctctatgtcaggcacctccctctctcttgcacatgcacggttttgaggagaagttttgaggagaagccatttaattcccaaacacgttactgctgccccatgtctgggtctggacttccccagctggctgattatttaagttcaaattggatttatgcactgactttcttttcttggagggaaaggcatgacctgccctgggcagagtaactaagcaggaagaaactgtgtgctgagtgccgagggctgacatcacaagcagccaggctgctgcagagcaggctgcagggagagggatggactcagccacagcccagtctggagcgaaggtgagaactggaaatccttaggctggtgcaacagacagaacagcccagtgctgtgtgtcctgcagaccctgtgcacagtgaaggcctattccctgtggattcctgccctgagctgcaaggaggagggaatctacagtgggagagctgctgaggctagcactgtgctagtcacagattgccacactctggggtccaggctgggaacagaaatgagagccttggtcaggagggagcttctgggacctgccgtgtgtacaggaagcagcatctactcaacctctgcagatagttgctatgtggggatgcgtttctaaagacatggattctcctgcttttcaaaagaatgttctcattttaaagtcccaattcaaccaagccaatacttcaaaaaacacagccaaactcacacatatgtgggcggcaactaccctacgggctgccacttggtgacctatgtctacctatttcctgcctggaatagataggaagtactgttattcccattttgcagatggggaaacagaagtcctgcaggctgaggaacttgacggtagcggcagagctgagccttagaatttggcaaaaggcggaagaaaccctaccttaggcatggggaactcacatgctcccgcgcagtagtaggcatcaaaagatttcggtgagattatccattcattccagccgatgtctgcgaagtccaccttcaggtacctccgggagcacaccctcggctcatcccactgcttcctccgggctttctgcatcgtcttctcgtcaaagtccagcacctgcgaggcggccatgaacacctcctggcccttcttcctgcggtctttgcgccctggccggggtttcagcgcccggaaggggctgggccacagctggtgcttgtggaagtgctgtgcgtgggcgcgcggcggcctctcatccagccccggcagctcgttgtcctggaggggcccagtggcctgcgcggctcggcgcacgcgggggtccgctgagttgttgggggctgcgcggggctcggggtctccggcagggaaggggtcgtatctctgcagcgtcactgccacgctgttgggctccgagatggccagatcgttggcatagactaggatgtagggcgcataggggctgggccggggcacccccgggtccctctcctcagaatccagctgggcggagaggagcagctcgccatcccggcgggccgccttgacgatgggggagatgtccttggcctgccacaggccgcgcggtgggggcgccagggccatggccccgcggagtagcccctgtgtggccgtgttctgcgagaggctgcggaagagcaggtgctggcgtgtgggcgggcccaggggcagcgggcggcctgaagcgttcttggcccgcggcttgcatagcacctcgagcgctcgaggccaccgaggcggctctgagtagaagtggaaagtggccgtaaggatcatttccgagtcttgcatggaagtcaggttgaagaaatacacggccttctggtcgaccacttctgtgagggaaggagagaccacaggctgtgaagttctcgctcgtgctcctgagggtctcccacccagggctggaggagcaaacgcccaccgatccacactttcaggaccatcctcctcccccgctttgcttccctcctttcgtgtaatcctcacatgaaactgatgagggcgccctttgcaatcctcagtgcacaggtgaggaattaaggttgagattgtcaatatcccgtagcaaacaacaacaacaacaaaaagcaacagcaaagaaataggggcagacagggaggcattcgggcctgctggactccaaagctcctgtttgctccccctgccctctactgcctctgcatgcacaaatgaacaaatgtcactgacaccttcattaagtgctcaggatggcttgggttgggtccaagccctgcatcaaggcagcccctcctgtatttgcacagccctctatttatgcaatcagtttttaaatgcaatcattaaatacacttcacattaaacccaaacattcttccaaaagagacgaaataaataaacgctcatgctttttgagcacctcctaagggaaaccaggatcaaaagtacagccatttaggcatctgctctttgttctgcctgaggacttttaagattgttttaacaagaaaagagcagcatcaggattacacaaggcaacctgactaaatctccaaggtccaggtaaagaccgggacgtctcaaccattacatctgcaacttggttcaagaatgctccagctccggcttccctggggctgccggccactccttcctatttgcctggtggaagcaggcgttccccagggcaccagggcagcacagccatgtcagcagtcccaggaagctgccccaaccttggcagcagcatgagtattgtgtcaggtttgaatcgcctaaacattattatatatcagtgagcgttctcaaatggccaagtccgctctaggcttctgaggagtggggagtctttcctggtgcctccctaggatgccgcacactaacaggacaccagagaggccaggctggctttctcctttccactgcttcatttcctgacaacgaagtgtccttctgctggggaacgtctggagaggagcagggctcccaagcccgggaagtgtgtgtgggggacactgggctctctaggggcatgggtcagggccacacctctctgacccctgtacctacagcatctgcagggatttttttttttaacagaaatattccactttctcttctttgtttctgttgggaagaaggcataattcaactgggattgttcacatactcttaagggactatgagcgggaagaaacagagaagcacatctatggaaggcctgataaataaatgccagtaaaggctcaggtggcactgaagccattaccttatttaatcctcacaacaaacctgccaggacagtgtcacagcccctcaacatgctccacacataagcagcagcccagggtctcaatgcacacttgaacctggcttccccaagcatgtggccttgactgcataacaatgacttccacattttaatcagcactccaggggactctggccatcagggaagtttgggaagtcagtggcagctgatagctcactccggtggtagcggtggtgtatctgcagcatctggggttgaccgatggatggggtgaaagttcaccaataatgttgcacccccccatccccaagctagaaaatgccctaggaaccaagctcccaggactcagtggcgccacgccctgaaccttgctttccccatctgcctcacagggacaacagcctccatctcacacagaggattgtctggaagatcacagaaacagcctagtgaagtgccaggtacaaaggaggtgcccccaaatgtgctttctgcctcttgaatctaaaggaccaaggctggcagagcaagctcccctccatcaactggggtaccttgcattcactgatccaaatatctgagctgcaacccagccaacacagcacattgtttttctttgatccagttcaagtctcaactcctccattgttctgctaacagattcagagtggggaggaacctttgaggttgtgcaaaagggtataagtcctacctccatgtggcttgaatgcctcctgccagagggagctcagccctcactgggcagcctgctctgggaagaccctccctgctggggactgctggggacaagatgggtcacccccagccccagtgcatgagggaccacaggctggtcctctctctggatgtttctgcatgtacgcagtgcagggggctccaggctgtggctcagagaagggacctcaacctgaaatctttcagtttagccgagcccaagccataagagagaagcattgaagagaacgtcattatttcctctgatgcgtgctggtgctctgtgattcatgtcttttctctcttctttcttctctgccttcctccctcctctcttttcttcccctctttccccttttctatccaccctcttttcctttctttcttcctcttcttctctttgttttcctgataaagatttgcaaaactcctactccaggctaagttgggctgaccagggtcataacaaagttgcccaggaggagttcagcctagaggggagacagataacaaagttgcccaggaggagttcagcctagaggggagacagactggtaatggcaatgacacccgtcttcagtgtctcctcatgtcacagttttaaagagcactgtccaagcgaggcccccggtgtgctgggtgcattccatcacaggtcaccccccaagctcggagccctccattgccccaaataaaactcaaccccttaccaaggccttacttgatctggcctgcctacctctgcaactttatctcctatccacagcccaaccccacccctctgcccccgtcacactggcgttcttctccttccaacatgtggctttattctcaggactgtgcctcacgcttccttccaccttcatggttccccatccagtaccactcaacctcttcaggtatctgctcaaatggaacctcccacaatgggtcccctgggctcccgtggctggagaacagcctcatcactctgtctgcccctgcttcattggccttcagagcacttcctgacatcctgctgtatactgatttactgctcttatcttcctaaaacataaactctaacgggacagggacactgccagttttattcactactgcaccgctagacctcaccataaggcttaggtgacagttggagctcagagatgcatgttgaatgagattgtctgtgaaaatcctgcccaagtgggcacaagagaagtgtggtctgttacttcagttaacactgggggttcctggcatgcttccctagagtgcagtaaccacagccttaagaagtcaaggaatcctcattctttacaaagatgcagctgatgatgcaaatccaaatggagacagtgggcacccaggtgtttagccagacttccccttgagcctcagtgttctcatctttaaattggaagaaaattgtttattaattatgacattctgagctccaagtgtatgtgcttggtcctatgctgagtgttctgcatgcttgattcatcattttcaccatgaagagagtagggagcggtcattcattctgtggacaaagagctgaagcttcagagagggtgtgcaatttgcctaaagtcacacagttggcaaggggtggagtcggggcttgtacccagctctgtctgaccccaagcccatgccttttgctcctccatgtgttctggatatgttcatgatctgcctaagagctaatggacaaagatcatgtgctgtgaactgcagcacgttttgcaaacagaggtcattattttgatatttttgagttctgactccctaagaagagaaagactgactttatttagacaagctgatctcagtggctcttgggaattctcagaactgtgaccaggtccactttgctgggcactcagcctccttcctgagggcagtggggatggtactgggggaagggacttcctcatccaaaggcctgtccagccccactgctggtcaactctcaggccaagagcagccccttagatgctctgccctatataaaaagattccaagacggtttggagatctgtcccttcacccactgcccctcaaacagccactagggcaatcagtgagaacgctgggcttagatgcatgcaccaacagaagctggaggaaggggcggtgggccagacggtgctgcagagaagagcagggaactaacacagatttagtacttagtgcccgtttccatgcaggctctagggttgaggttcaacgcctgctggcatcccttactagctgtggggactcaggcaagtcatggagccactttgtgcctcagtttcctcattcataaactggatagagtatttgcacctccaaaagttattgtgagatcagctctgcagagcgcactagcagcactgtgcctggcacccagcaagggctcagaacagttatggcctcaggaactattgccaccctcagggcactacacccttgctccctgacctcctgcccagtgggaggcctcacttctcctccagcccttccagcaggagcctgagaactcttttgcctctcccattcctgcttttaaccaatctccaggccctgtttgctctgcttcctgtttctacacaaccatcctgaacacagcatctttccaccctgcgctcagggctccagactcaaccacaacagtggtcccagaactttgttccctcttacatcgcactcatgtctcaaaagcaaattctctattagaagtgaaaggttaagatccttactgtgtaaagaacctttgcatatcagtaggacaaaggagggactcccatacaaggaggcagtttccacaggaagaattgcaaatagccagcaggcatggggaaaagttcaagatgaccagtaatgaaaaaaagtaatttcaaatggaaatacctgcaagttttacctgcatgctgaaaatataatccataaaagatgtatccacatatatctcacatatatatctctcaaatatatccatatatccatatatatcttacatataagggtaaaacaatggagatatagatagtggagacatagatagatagatagatatggctggaatgattctaccaaaatatcatactaacaattccggttatatctggctatgtgattagggatgacttatgttctttactgtgatcttctataatttccaggttttccccaataagcatgcatttatttataatcactctctctcctttatccctctttttccctgcagtctctcctcttcctccctctctctccctctctcctttctctctctcccctctattcttctctctctccctccttccttccttctgtcccttacgcatgcacgttgtatattgccccattgcctatgggggaacaaattcataatactcatggctctccatggcctgcttgcaacctatttgtccgtctccatctcctgcctttctctccttgcgttatcattaaaaccaaactcctggcagtctctgaacacagtgaacagcttcacttccgcacctggctaaggcccacctgcccttcaaagtggctggggcctggcctgctctgggaaggctttcctggccccacccagaggctctgcccctgccaggtcagtgcgcctttgggctcccgcagcacccctgccctccttcttatatgccaccccccaggcctgctgccctattctgctgcttactttgatctgccctgctagtttatgagcttttctgggcatctttgtgctccctgagcttacagcatctgctaccaaacgaagtgcttagggaatacttggggaactgaaatcaacttgaattttggcatttttgacaggtgagtatgtagtattattttcaatttagagatgaagaaaaccaactcagtatcacattggtaggtgacaaagcttacatttaaacacacgtcattcagtgggaattaggggtggtctaaccttaacccttagggtcaggttcataggctttccccaccgatgcagatttaataaggaacgaaattcacttcagggagcaatgagggaaggaaggaaggggtggctggtatatcaacagcaagagctaatacaccattgacacttacctgtgtcaggaatggtgtaagcacttgacatatctcagtttccattaaaaaaaatcctataaggaggggagcactattagctccattttagaagtgaaaaaaactgagtcatggacaagttcagtcccttgcccagatcgcagaattgggatttggaccccacgaggccagctcacagccagcacttggcagctgagctgcactgcccggtggcgggggaggtatagttacgtatcgcaggctgtggggatggaggcatttgttgttcaggaagaggtgctgccccactgaggcagcagaaacccaccactggggagcaggctgagactggcatgttctcggaccagagctgaagcctcccacatgggtggcatcatccatgagagaagggtccctgcccaaactcatacctcctcagacaggtcactggatcaggaagtaggcacatctgagggcaggcaagaggcttggcatgaaacactcagatgaatcaagggaggagaggatcaagcaacctgcctgggcccccactgtatgcaaagcacaaaacctgcttagcccatttaatcctcacttcttcactgtactacaaggaaactgatgctcagagaggtaaactaacctgtgccactgcacacacctggtagctggtacagctgggattcacacccaaatgtgcctcaggcttccaaagaagagggatttgtcagacactccagactaccagaatcctgatttcccaggcttgtctgtttcaccctacccctcccagaccctggtcatagctctgagggagatgacagggtgtggggagtgacagtgagaacagcaatgacctggcagatgggagttgccaacccctgccactgtgaacaaccactgagtctcagtttccttatctttaaagtgggagtgctggatttgagatactgtcttcaggtcctttttgagattaataacctgaactccactgctacttgtactaccccctttctgtgaaaacagaatgacacaagaaggcatctccatgcctggctgcagcaagtagatgggctcagtgggcaggctcacccgtgtcgcagcagtgaccctgctggccttgcttcctcaactacaaggctttgaggattgagttaatagagaagcaaggtcaagtttaaacccacaggaatacacaatacttagcacgattatttgtgctcccaggggaatcccgtacatcaacacttaatctggccagtgctgggctctgagcttgcacatatgacctcatttcatcttcccttcaactgcacaggggagatattggcaagccttgcccattttatcgatgaatacactcaagtccacctagctttagtgatttacccaaggtcatgttcatgccagatgattcttaaatggtttaatttaataacgttcctcaagaaatggaccccacatggtgcaagaaagttatgagtgaggatggagttagatccaattggcctggagcccagggccactgacctggtgagtctgctaagtggaggaggagggcatggggcctctttgtggcaggtgctccccaatccatggttatgagaggccacagatgttaccttgagtcacacagccagtgacagatctgaccccaggctgtctagctccacagctaggcttgtttccctctccctcaggaggggagcctgtagactgcagatttttctcctgttgaatggcctcatcttctgcagagctgcaggagacccccacccacattttctggaacattattctgcaaccaggagtaatcaccatgacaaccagggtcttctcaccacccctgtggccctggctgcacctcctctctacccagggcctgcaaaggtgggcaggctgctgaggcaggagcctggaagtgctctcagaacagggcagcatgggcctttgcaagtgccctctgcccagctccatccaaggggctgaggaagtggaaaggtgggacagaggccggagataggcagagtgttcccactgcctaagcccctgggcctttccttaaacccctgtggtctgaacgcttcatgccagtccgtggaagtcctcaatcccgggcagccaaggcccttctcagtccactctgcttccctggacacaggaaccatagctgacgccagctaggggctcctgcttcctgacagggcccagtgcctggagcttctgcagggctgcctatgttcactggctgtgcccttctcatttgtaaaatgcccacataattgaccctatgacagggatactcccctggcctatgtcccctcttccactctctgtgcttacagccttgtgtatggggtagtctgtgtatgtccagcaatgtgggagcaccccaggggcaggacctctgtgccacctgctgccactcttggtgccccactggaggttcagggcctggcatggagagatcagtgaatcattagtgaaagaatgaatgaaccactcacccgttggctagaagaggaaaagtagaggtgcacgggtggggagacagaaaagtgaggaaggtggagaatgaggagaaggggtcctggggcaccctctacttacccagcctggccctgaagctgcggaccgtgttgccccctcccggccgcgcgccctgccggctgtacttctcatagagcctgtgcatgtggacagcgaccatgtcctgggcgctggggcccaacgtggcggccgcgtccccagggtgccgctggagatccctgtccccctgcaggccgtcggcggccgcgggcagtgcggaccaggcgggggccctgtggctgccggccacatcccggagcaacagcagaaacaacggcagcagcagcagcagcagctggggcccgggtcccgggctggtccgagcggggacatgagccatggcgtggtgagggcggcaaagggccgaagtccaggaggaggaaggcgagcgctggcgcaccggaggctgcggactgacctcgcggcagtagggcgcgcggggagagcccgggcagcagggcgctggataccgaggtccgcgcggggcgaggggcttagcggagcaggcacccgggcgcgcggtccgtgggtaccggcggcccgagcccccggccagcggtcacagccgtccggagcagcgcagagccgagccgagcccgagtcggcgcgctgccttggcggactcgcgccgcgaaagtttgtagcccactgcgcgcccggcccggctgcttcgaggggcggggcggggcggccggctgcgccctcgaggggacccggctgcgcgccccggacctctggggctgcagctgacagggtcgtccctggcccggctgccgtgtgcgtgcgcccgtgtgtggcagcgtgcgcgcgccggggtgtgcgcccgcgagtgtggggggcgtgggcgagcgcgctccccgctccccagccgagagcccgagacccagccccgcagccggctcctgtgtgtcggcgccgcagcctgccctggctgcgaggggggctgggcggcagttggaggggggcctgcctgctgggttgcccctgcaatggcatgcgatggctatgtgattgcaagatgacagctcccctgtgaggaccagagaggggatatgtgtgcgcccagttgcctcggagtcagcgtatgtccaaaatgtgagagtgtggggaacagagatcctctctgggctgactccgtaaagaaaagccctcaccccaaagctcatgccacccaagggaactggaacaagatcgtgattaaaactcagaattagctcattaaccagccctttatttgacgagagtaatttcagttgttgaagaaacacatcaaaggtccttattaatctttggacatgtggccttcaggattgcaggaataagacatgctttcaatttgcctttaaaaacatttccaaagcatcagagcaggaagagagaaagcagtggctttcctaagaaggattcccagtgaagtgagggtgtagtgagtccctggcccactgcccctcagcttaaccctggggcagaaggtcctgatctttgtcttgcctctagcaggatttcttctccattgatagaattcaagggctcttatgaacttgatggggaaaaaaatacatctttattttcattaactctaactgaaacttagcattaactaatgttataaatgcaagcaaccaaccacagtggtattagtgactttgtcaccaataggcaccatccacagatattttcatatcacatgagagtggttgcggattcatcaaagtatcatgtttgctcattaccacttcagttaggcctactgctagttagttagcaaaaaggaacatagttactatgttacaaaattgtttttaaatatttgtgataactctattctaacgtaattgtcttcctttgtaactctgcatattttattttatgcatttaaaaacattcttttaagaaggggtccactggcttccctagacttagaagggggcccaagacccacctaaaaagtttaaggacccttgagagggaaggaaaggaccacgtcaagcccatgttcttccagaaagctcccagatacagtctatgctacatttcaaaggactatttgcaaacttgtgaacaggctgttccctttacttggtaactttgggctctgtgagccaaaatagttacttttcttggagggctcacaatgcaataattgaaaaattgctggaaaaggcttctgttggtgtgtaaaacatgacccatttgtaattttttaaaatcttgcagtgtcaaattagaggccatcctattaagagcttctgaacctcagacttgtagcttttggaaaaccagagaaaagcattttatttgttttgaaaattagatcacagtgtgttcaacttcccattaggatagctcccatttgttctgaaccagttttcaaaaatggtttgcctggaagtgagatgatcgggtctcagcctgggacttagtgaatctctccttataaatgatccagaccatctttcagtggtcccttcccccactcccacccccatttccctccttctccatgtgcccctcacttcccctctgtccccctctccccttcccccccagaatgcctctgacctgcaccggctgggggtaacctctgctcatgggtagttttgtgtctgttggggccatacacaatcgaggcctgttgaaaaggagggtgagtccgcaggaggcccgcacaagctgggctatttggaatccgtgtccattaaagccttctggctctccttaactcattcccgctccattcaagccagcctgagggtcaggctttagccagcactaaaacctgtagggtacagattctctgacattgttgggaaagaattaaggcatcagccagggatggctaatatttcttgcctcattttattgctgaacagcgggactgtaaagccttgaacacgagcactgtggccccctttcatgtagccgagatgatgggataaaaatgtgtttggtgaagcaattcagattaccactgggtcacatcctcgctggctctcagcacggcccttgaaacagcatcactatgacaagaaacaatctctgtgcaatttcagctcatgcagaacagtttttctagtgtggaaatgaggctaattgtggagcttgcccacgagaatgttttgtttttaatagctcaggccgcagctcagaataagagttgagatggcagattgtggagacaagtccttggatctgtgatttctgacagcttcctacaaaattatcatggttctgggagttccgtacactgcaattgccaggggtgctgaggtcttgaacttgctgattggagtgaacagtgttctctccagacaggtgagaagtagtttgggggccctcagtcctctaggcctccttgctgtgcactctgggatagcagggttttcttcagctcagaaagtcatgagcaaggagtgaagagactccatagttatgaagctctgcacccaagtaaggaagtaaaacaaaccctgggtagttttgaaaagcaagctcatttggtttcatcaagaacctctccccaaataaatgttcccaagcgattgtttcatgatatcgtccagttaatttgtagcagagctagtgtgtgattttaactagctctgtaaccctggggcagccccattgcctctctggaatcctaggagcctcttctttaagtgagaagtctggcctccaggctctgctgtagctcctgtactctcccgctggttctgtggccccatgtcaacatgttcttggaagtgagggtgctcccatgaccctgtggagtcaattgggactagattcatgtccctattttcactgctacttagctgtgtgatgttaagcaagttacttgccttctctggacctcagttttttcaactctaagatggggacaagagcaggatagtatgaggattcttggccagattttaaagtgacatgatactaactaaattgcactgatcattcagattggtcttttcatttattgtgtgtttgaaagaagttgtagcacatttaaagtagacccagactggcagatttggtgagagtttcaagcctggctgttccttactctgcagagaaaattcgtttcttagtgcacagtgccaacaactaaaaaaaaaaaaaaaaaaaggaaagagaaaaggaatgtttccttgatgaggaagtcacagacctctaccaaggaactgttatgctgttattgtctgtgtctgcgggttcttgtccaaagattgggaggaagattcacagctcttcatctagattttcaaagctcctggcccttaaggacaaaagaaatgcaagtgagtccctattccggttggggcatgagctgtggggtgctagagacaggaaccccagggcctccccaggccgcggggccagagtgtaataaatctgtgaaataacaagcacaaaggactttataatcaatgacagattttatttttgctctggcaaaatccatctgtggagttaacattttacagggaaataactacccactttgtgactcctcctcagcccatattctctttcttaaagttgggaaaagctcagaaaatcaaagtcggctcctctgagaaccgtggcaagcgaaagcatgacttcccctgggcggggacccaactctcccgttacttcctagggtggtgggggccattcatttctgttttgctaaaatacccgtgacatgtgaataaactaggattacagaacattgtctcggtcagtaatctgagccggcatggcctctggtttgatgaaatatggtgctctctgagcaaacatgggaattggtattacttctctttaaagctgaacagtggggctatttagaactgatgcatgaatgcagcactgtggggagtgacaatttgaagggaaccgatttgggggaggagggcagtggtgtgtgtgtgtgtgtatgtgtgtgtgtgtgtgtgtgtgtgtgtgtgtgagagagagagagagagagggagagagagttggccggagccagccagttaagaggagtctatgggagaggtggccaaggggacactttgaaaattaggacccctttgtggcttcgcagtctccttatcacccccaaataatcttgctcaaaacctttgactactctccttcacaggatggataaagccttctgtccttgtcctggcatttaagccctaaccatctggcctctctgtcctggtggagtctttctccagcctctgttcctatgcgtcctctcctgtcccagaatttagagcagcttcattccttgggttctcatcccaggcccctccccatggctttaaggtggctgtagctaattcccctgttgccagcacccagacattcatggcctcagctgccaggacttctgtctgctgagggctcacagtggagcccttcctcaggaaggccgacaggagcggcctcactcaagttatctcacactccgggggcagccaaagccagtgactaggtgcaggggcctggaaaacactgtagggccacctggctccgaggctgtctataccactgtgtcatttagcttctctctctggttatcctagtccctcagctcccttattggtgtggtccccctagcactctcccatatacttatgcactcaaatttcgatctcagagtccctaccctgagatatccaacctgagataattcatgccaggagtgatctaaggaagtgggctctaaggtggcatctgaggccctcatcatctgacattcagtggcaacgaggactctggctgctgtaactggagtccccatagcctgatgctgtggtggtgagttggaggggtcactttcttaggggttagagaggttcaggggaaggaataattctgaagacagtgggattgtcaagtgccatggatgcattagaaatagacaataaaagattgagaaggatgaaacactaattgaaggcagagtgtgagaattggaggatcatggcaccatataaagaaaccctcagttgttacagccagtcctgctgaggactgggcccaggacttacatattaagatagcagagctccagaaatggtttgattcttaaccccagcacttctgttatgccaaagtcaggggtggggccctgagacttggagtgggggcatcttgatggatgtactcaagagtcttaaaaccttacacttccttgaacactttggacctggggaggtgggctctgcctaccttgcttgaagatgataaagatgtagtgtgcgcccctctcataatctaccctttcctgtcccctggctgccagatgaaacctgggcttatgtcaccacttcgcccagccagggaagtctcggtgagaggtgaggccagctggacttcctgggtcaaggggggacttggggcactttcctgtcttacaaaaggattgtaaaacgcaccaatcaggaactttcctgtcttacaagaggtttgtaaaatgcactaatcagcgctctgtaaaatgcactaatcagcgctctgtaaaacacaccaatcagcaggatcctaagagtaggcagtcgcagggaggattgaaaaaagggcattctgacaggacagaaatggaacatgggaggggaccaataagggaataaaagctggccaccccagccagcagcggcactcgggtcctcttccatgctgtggaagttttgtccttttgctcttcacaataaaccttgctactactcactctttgggtctgtgccatctttaagagctgtaacactcactgtgaaggtccgcggcttcattcctaagtcagtcagatcagaaacccagtggcgggaaccaactccggacacaccgggcccaccaaggggaagaatatggtagactggaggatctgcagagtcaacgtgtataagcaagacctgagggagtatgattgggatgggtcccaagggtgctgaatcaagggagactggatttggaagtggataagggagagtttgtcagtctaagagcacggtcccatgatgccggttttccaccatggcaagtgccttagggtacggggctgatatgcttatgggttggccgttggacacttggaaaaagcaatggtctgcagtaagtgatgtgtcaacgctgaaatagctgtggtaagtgatagaagaatggactaaaggctcagagagcagacatgctggattagaaatggtacgcaggctggaaagccaccagcctatatgttccatggaaggactcagaggactctccatttaccaaagtgataaggaatccactggtaagagggataccagcaacatgcaaagctgagggatggcttctatctgtaggctggggctgagggtagagggtattgttactgatctgggctccctagcagaaatgaggatgaaaggatcccaaaataatggagtattttgctgtgcaaatcaaagtagatgcaattatcaaaatgagaggtgcagtcagatttcagtcagggttcccaactcatggggagctatgaagacatttaatcaaacctgcagtcgctgggggtaatactgatggacagcccacaagagcaccattcaatttgtacaaactaagacaaatcaaagatggataaatgaggctgaggacaaccactccaaaaaaggtcacacttctttgatgggcttgagccagtttctatacatgaacactttgagtgagggagaggctgggacctcaggaggaaggcgcctgcaacaccacagcaaggatagatggtggtgatttccaatccttccccaaagggacctatcaccatttactcaggcaaccactgaacctgagggaagggaaacatccagacacttcaagaataaatggacacatggtccaggttgatattgatacgaaggacccaaggcctcattacaactcccctgctagagtggattttgtggaaaccagatgatcaatgaatcctggtgcagcccagctcgctgggcttgcggactcatccacagcgatttccttacacctcaaatatagaattgcaacaaacatccttggtagctgccagaactttgcattggttccttggcttacagggcaagagttagaggagtggggaaggcaagttgaaacttgtggggtaagagttaccatagtagagaagtccaaggagaagtgtctgaaaccattccctcatccctgtcctggccagattaataaatcaaaatcagtgtcgtgtcccaagggaaatggtagcgattagtgccatccttaaaaacctaaaggatgcagctgttatggttacacactgtcctcatttaattcaccagtatgtcccctacagaaaaccagacgtatgctagagaatgactgcaaattcaccaagtgatgtgtgagtagcccttacctcagcatctgtgccagatgtgggatcttggcagagcagattgacatggcctcaggaatctggtatgccacctctgatctggtggatgtattctttttcatcccattcaagaacacagaagcagttttcattcccatggggcaggtcccagtatgcatttactagtatgtgtatttcttgtcctagggccatgttaactgtaccacctctgttatgagggatcaaatggatatggatcatttggatattccactgagcataacattggtcctctgtattaatgacattgtgttaaccagaatgaataagtaagaagtggaatcagtaatcagtaagaatactttagagaacttggtaagatgcctgtgctccagagggtgggagatgaaccccatgaacctcatcactgagactatgaggtagtgtgttagtccatttgtgttgctataaggaatacctgagactgcgtaatttataaagaaaagaggtttatttggcttatggttcttcaggctgtacaagaagcatggccctagcatctgctcctggtgagggcctcagggagcttccactcatggtggaaggtgaagggggagcagggatcacatggtgaggggggtacatgaaagagagagggaggaggtgccagatccttttaaacaacgaggtctcatgtgaacccacagagtgagaacaaactcattattgcgaggacagcaccaagctattcatgagagatctgcccccatgacccaaacgcctcccactaggcccacctccaacattggaggtcacatttcaacatgagatttggaggagacaaaacatccaaacatagaggtttggcctgagcaacttggaacattccctccaaaatagaaaacacattgtatcttgcacttcccatctctaagaataaacaattcctggcacttttttgggctctggagatgacaagttccatcgttgtgaatgctactctgacccagagggacacaggaggatgccagctgtgagtggacccagagcaggaaagaaatctgcaacctgtctaggctgtgagcaagcagcccagctgcttggatcataggagctgtcagacctgtggtattacaggtatctgtggaagacagatatcatgtgggatttgtggcaaggttcaataggagcgagtccaagccatctgcagcagagaattatatgccctttgaaaagcacctcctgatactgggcttcattcgagatgaagagcttaatcatgcaccatcaggtgatcatgcagccagaactgcctgtcatgagctgtgttcttgtagatccaccatgtctacatggtccataagcttgggtgggcccagcagtaactcatcaaagatggaagtggtccatctgggatgcacatgagcagtgttgggggtgcagtgaggctgcactagtaggtggctcatacctccaggccatctaccactgtgcacctgtgcttctctttcatttcatacctgtgaccacgtgggggtcccttatgataaggtgatggagaaggaaaatgtatgagtttggcgcagggagaagtagacttggtatatgggtataaagtaaaaatggacttttgttgcactgtatcctaactcagggatgaccctgaaagacagcagcaatgaagggaaatcctccttatgggcagagctttgggggtacagttggtcatccaccttatatggaaagaaaagtgacctgagggattttggggcagtgggaaatggcttgattagttgatttggggactggaagaaaacatctgaaatgtcagggctacggaggcctgtggacaaggcatatgaataggcctacaggagtcggcagggagtgagaggatctttatattgcatgtcagcgtccaccagagagtacccactgtggaagaaacactagacagccaaggatatagactggctctgtcagttgacatcagcagcctctgccatcagtcagaatgagtgcctgcctggagctgctgtggcaggaatgggagctgtggatagcatggcagcatgagtgccaactgaccagggccaatctagctctgccacttcccagtgtgcagccaaccagcaagggagaccaatgccaagcctgtgatatggcctgcccctggctgagcacacgagttacctggtggaaggatgattaactggattctttccaccctggaaagagcagtgattcgtctggtctggagtctacacatattctgggtttggtttgctgtttttgcctgcagagcctcagtcagcaccacaaaacttagaaagcatttgatatcctccttcaggatcctgtgtgacagagcatggaaccaaaggactcacctcgcagcaaaggaggcaccacagtgaacacaggccaatgggatataccagttctggcgcatctccgtggtagagcattggaaagtgcggctgaagcaccatctggagaggatgctctgagagggtgggaggccatcctccacaacacaatactcaccccaaaccaatggtcaatatgtgttgctgtgtctcagtcagtagaaatcatgggtccaggaaccaaggcacagaaataggagtggcattgctcatcgtcacacttagtggcccaccaggggaatctgtgctgcctgaatgctcggcacagtgggtctaaaggtcctggtgcccagaggaggaatgcttcctccaggggacatggcaagattcccttttcatgttcagtgacaggtgctgccaaccaccaccagctcctacgtctagagactggtgggaaggaggggagtctccatcctgcacaggtcatcaaacctgtgctgtcacacactgggacagggaggatgtctttagcatccaggtgacctactgggtcatttcctggtgcctccctgcccaattctgatgacaaatggacaagggaaggagccacagcttgagaagggcatgacaactctctggggcgtgagtctgcgccacccaccaggtgagcccctagagaagcagaggcactagccaaggtggaagagaacctggaatgggtggcagaggagggaattggtgagtacccatggtcctgagcccagctgcagcacaggtactgtgatcacccctttaaccttcttcctcttgtaagctttcccaggaaaagagaccagggagcatcctgggggagctgttcccaggtaggaccggattatacaaaacaagtggatgcagctgtggagagggaagcctgtagaggacactgtggagctgcccagctctacccttcagggttgaggcccccatttcccagctttcaggggtggtgcctgctgatggctcctggctgaaaccctccccaggaattgccctttgcagcctaaaggagctgcccagcccgtggccatgcctgctcttccccagggccgctgcatctcccagctgggaccacacggctgtacaaaaaagtctgggctccctagtctcaatttgggacaacactgagggaccatcccaactccagagctacctgtgggaacagccacagcccccgttgtaatcgcattccagtcaacttccccctctgtccagcagcctctctcaccccttccgggtggtgacgttcctaggttctggcctcataaacccgccacactcattttgccacccctgagcctggttctggggtgctgcacatgagatggcaggacccaggcacctagagtggccatgtgtcccaacatgacaactgcttacttccttattccctttccacctttctgaaaaatatcattcttcttctggtatttctctaacatctctctcacacttcctgattccccttgttcacaggaaaagcagctggcaggttcataagaaattcataagcccatgtttcttttatttatttttatggttaacttctatttataacaaggaatgctggttttccatttatacttgagatttaaagattctgtttaaaataaatttaagtaaaacggagtgagtgggttttttaaaaaacagctaagtaaatgataacgatggcaggcatggtgaaggtggttcactgaaggatggcgacttgggcaatgcctacaccagcaatttctcctgcctgggagcccctctgactcaggtgaataagcgtcctgcaaaaaccagccccaagactccattctttgcaaaggtcctggcccctgcgtttcagagatagtcatgtcttcctgtaagatacgtcccactgtgtggaacaatctttctccacgtctcatctgcatcaggccagcaagggccttgagcgctaagtctttcttactccctgttgttgctccaggacccagtgtgggctgagacacagggaggtttgggggcaggattttaaagtggtccccagaattctgctcctggtgcatttgcccatagcaattccatcctgagttggggtggggcctttgaatatgacgcatgtcactcctgggattcacttgtgttatatggcagaggtcatgcgattttgtgtgtatctaattgaaggccccaaaccgctgattttgatggaatgaaaagggagattatcctgggtgggcctgccttaatccggtgacagcccttgaatggtggcctgggccctttatgaagagagggctcccatgctggccatgtcctgacgaagggtcctgtcataggcctctaggagctggagccatccctgatgacagcccagaggaaagtggggccctcatactacagctgctaggggcttgggagagggaggacttgggctccggaaaggtctgcagcctggagaatatctggatggcagccatgtgggaacctgactggagagcccagccaagctgtgaccagactccgggctcgtggaagttgtgagataacacatgtgtgctgttttaagctgctaaacttgtggacgtgtattatgcagcgttaggaaactggcacggcagcctgcagacattggccgagcgagtatgaaagcctgcagggcaccccgcccactggctcctgagatttacaggcgctttccacctggggagatgaggctgccagtgcagggaagggttggcagctgctgcagccctcgagttgccccttacctcacatggtgcagacaatgaacagaccggggactgcccaaggtcacttagagtggagcacgtctgggaacccctctgagcctggcctcctcagccatgcttttggtgccagccagcgcagtgcccactccatgacctggaaggcatcacaatctcctctttctttggtgacttcagctatcagtggatctccccaccctgccgcctccccatggggtctgagtggcaggtggaatgtaccctccctcttctcacccaccctctggctctgggacatagcagctctcccctctgccccaggcagcccttcatcctggagctctgccttgggcactctgatggcctggccccttgccccagtctcctctaccctaccctccaccctgctactccacccttcgctagctgttttgtctgcctgcatggcttcctgccttctttttgaaacagctctctcctttctgtggaagaaggcttcccccaaaccacacatgaggctcagtggagctgcctgtctgagaggctgcctaagtgccatgccagggggttggtgtatgccagtcctaacacttcccccagccacagtgaatcccaggagaaatcctaagttgggttagtcattgttccacaggattcttctaagcagacttggtggtgacagccccgctcttcagtttgctgaggtggaatgtcaggtggccagaccgggctggtgctgccaaggtccctgtaacacagagacacctgtgtctaactgaagggaactgaggcagcagaggagaggataaagaggtggagaagcaggaagaagagaaggaggaggaggagggaggggaaagagaaacaggaagaggaggagaaacaggaaaaaaaaaggggaaggaagaggaggaggagagatgaagatgagagaagagggaaggtgttttagttacaaattatccccaaacttattatggctcaaaacaatacacaggttctatctcacagcttctgtaggtcagtggttcagctgtggttgagctcagggtctttctcaaggctgcagtcaaggtgcaggctgaaatctcccttatcttgcaccggcttcaaagccctcgaggctatgggcagggttcagttctggactcttgggctgacagctccatttcttgctaagttctgagctcaggattctctgcttattctgggccttctctttcagaacgtctccatccacttcccaatccggcatctccactcagacctcaggctggcattccccagtggctctgggataccaagcttgcttccagggatcttctgcttctccttctgcacctgctcccctactgtgatggtgccatggagctgaaggttcatggctggctcctccctcttttcccctcatccccagccggctgccagtcctgtgaagctcatctcttggagccccctctgcctgctctgcacacggacactttctcatccaggtcttgatgctctcttgctgctggtcgctatgccaggcccactgccttcaggctccttcctcaaggctacagggcaatcttccttatgacagacgtgcccctgccaccctcctgcttgtgggacctcacctgtctcctttccgtggcatgatgcctgtgtcagacaccaacacatggtccctgcccctccttcacacctctcttccaggcccctgcgtgtcttctcatttcctgcccacatactccttcctcccaaggacaggcctcctcagccgttctctcagcctgacatgtcatcccccagacccacccttgattttctccacctgcaagagtcccaggatcaagtttgtctccctcaggagccctctcagaagcccccctgcctccacagccctttccttccccttaggaatgggacttgctccagacagccctgtgcagagctgtcctgcaggtggctgtcttctgccccaggctcatggggggacagtggctgatgagagtctgtcccatggaaggtgtctggagagttagggaatttgctccaggaccatgggaggggaggaaggggaccatgacacatgggggtgatgccctcgatggcatgaagcccctccactgccttctttcctctggcctcccttctgagccccgatcatgagtcaggagggtagaaaagttcacagccggaaactctcagctctgagcagttgtcagtttcctatgattctagcaggatttgctactcctccatgatttactcagacatcatggacgatagaagccaaagctaaactgaacaagcgagaatgaaggattaattggctgagataacgaaactgcctagaggaagggatgagctagccttctggaaaactcaaagtagggacttccacattgtcagcctccctccctgccctccctccccttccctcccttcccttccttccttcccttcctccctcccgcccccttccctcctcctccttcctccctcccacccccttccctcctcctccttcctccctcccgcccccttccctcctcctccttcctccctcccgcccccttccctcctcctccttccttcctccctcctcctccttcttcctccctcctcctccttcttcctccctcccttcctcctcttccctctctccctcccttccttcttttcttctcccctttctccctcttcagaatgaaaacagctttggtgttaatggacaatgtaattactgcttggctactgtaaagtgagagtgatgtgtaaggtaggcctatcaacattctgacagccatgcggacccacaggcagcgaatgtttgctctaggggccggacagtcaatattacaggctctgtgggccatatggttttaactctgcctgtgaatgcaaccatagacaaaatgtcaatgcatgggcatggctgtgtgccaataaaactttatatacaaaaatgatgggctgggtgcggtggctcacgcctgtaatcccaccactttgggaagccgaggtgggtggatcacgaggttaggagttcaagaccagcctggccaagatggtgaaaccccgtctctactaaaaatacaaaaaattagccaggcatggtggcgggcgcctgtaatcccagctactcggtaggctgaggcagacagttgcttgaacccgggaggtagaggttgcagtgagccaagatcgcaccactgtactccagccttggtgacagaccaagactctgtccgcccccctgccccccacccaaccaaaaaaaaaagatgatggcctggatttggcctgtgggctgtagtttgccaactactgccataaacattttcttctggcctcaggcatcagcatcattctctcctatgacagaatagtggagggggtgaatgtatggaggtcatgagtccagcatctctgggccctctccaccatggtttatgaccaaggaggaaaggcatgactccctgccagcccagcctggggatgccagaggtggactgattgacctggcatgaggcaggtgctcaagtctggatcaattgtggagggaagtgtgtggctcttggtggtggagggatgtgctatttgatgaagggtgagctgtttgggacatgcaaaatgatgaatgtccagtacattttatatcccttgagcagagctcagcttttatgaaaccagtcttactaattactatggcatgatttcttaaaaagtagattgttttcacttactctgtcccatcatttattgtttacacagaagttcagtgcatttcctgactccttcccacctctgtgaatgcgctccaggctatagagtatctcccaacagatattcttcagtccagaggactcacagtattggcctcctgggatttacttggtttcttgctgacatttcccctgtccccatggcccttttccacaccccacctcctacctccagtaggtcagactctgggaggcactggcagactcacatccagctggataccatcatagctaaagcagtgctgtgatctttgtgcttctgcctctgtgggtagagccctgatcccctcctgtggacccaacccgctcagtgcaggtggacccagcaagcagagctgtggattcaggctggtggctgatcccctcacaccttggagaccttggggttcctgctcgttgcctcaggactgcctccttcctggctgttggggctgctgtgcccagctcacctctggggtcagcctctctggggccggcttcttgctgcaggtacaagactttggcattctcctctgctgaaaaatgcagataatgatgaacgttcctcggggtgctgtgaagagcaaaaggattgcggaaagcacatgcagctctcggctcatcgccgggctagggtgaccatcttcatctaccctgaatcctcccagttttagcaatgaacatccagcatttcaggaaaccctcagtcctgggctaaggaaagctacagtaagtgccactggggctggcattgctggtttcttccagtcccaccgtggcctgcacagggacgatgtcctcccacacctccatttccagcatggagacgattcaaggccatcatgtgaacagctcctcggcctgctgggtgaagaactgagagatcaatcccacactctggcctccacctatgtgtgcctcagccttggttccttccctctcaggccatcctaggagaagccaggtcctcttgggggtggtgggggtgcggggaggtttgtggcagtgccctgctgcccaccaaagctgactcacgactcctccaagctcatgctgctgctcactcagggttgtgggactgccagcctccagccacccctctgctcccttccacctcctgctgtgtcaactgggccctgtacacatgcatatgataaccccctgcctggccaagctctgtccacacccctccaccctcctgcgatgccaggtgctgcctcctgggactccctctcttcatgataatatgcactgatgcccttctctgacatttagctgttttcagggaggagtaaactgcatggtgggctggacatggtgagcacagggtgaaacagactgcgaaggaaactagatggctaggcttcaggtcggcgccttccatggacatgggagttgttgggagggcagtcagcaggaagggggctgcattgggaggggcttggaagatgggctggggagatccccaggagggaggtagtgaggggctgccacctaggtcttctgcttcctgtgaaggacttgtgggggagacctcctctcctcctgtgtccacagtgcccgtgtcagactgcagctgccactggctccataggacaggaacccctgagcttctgcactgttcctgctgtcagggccaacctgacagagttaaagccaattccctccaaagccagctagactcggggtagattcttctaatgccactttgcccagtgatgcccttgcttcaggttcaaattaaccaaatgaacatattgcatgagatggtttcagccctatacgaagtagttggaattctattagatttcccctgattttcttccttgtgagcatttgttgttagctagtctagcactctagtgtttattacatatttctacttcaggtaaaattcatcaaacagagtgcttctcaatatgcattcctctgtggggcttgctatttccttctgcccattttggtgcacagtacagcttttggtgtctgtccctgctttcaggggtgccgtctgtgaccagcgaccccaagaaagccacacccatggtgctatattagcacctgcacccccacatcagagccatcagacagaaataccaactcgcagggtactgaaaaaatgctttcttattataaatgtacatacaactcattgaacaatatatggaacatctccaaagcacagatagaaagaattctctatttttgtaccacccaaacttaccattaccaggtggttcaagtctcttccatcctttctctgtgaatctcttatttttcatacagttgatccatttgtagtcaacagatgtggattttctttttgtcactaagtgttagaacataagcatttgtttaatatcacaaacaaactttcaaaaacatacgccatagagtgtggaataataggtattagagacttggaagggtgggaaagtgggaggggtgagaaattacataaagggtatagtatacactatttgggtgatggttatagtaaaagccccgactatgcaatttatccatgtaacaaaactggatttgtaccttctaaatctgtattaaaacatattttaggcagggcacggtggctcacgctgtaatcccagcactttgggaggctgaggcgggtggatcacgaagtcaggagattgagaccatcctggctaacacggtgaaactccatctccactaaaagtacaaaaacttagccgggcgtggtggcgggcacctgtggtcccagctactcaggaggctgaggcaggagaattttgtgaacctgggaggtggagcttgcagtgagccgagatcatgccactacactccagcctgggcgacagagcaagactccgtttaaaaaaaaaaaaaaaaaaacccaaaaaacaaacaaataaaaaacacatattttaactgactgtatatttctttcttttttttttttttttttttttttgagacagagtcttgctctgttgcccaggctggagtgcagtggtgcaatctcagttcactgcaaacctccacctcctgggttcaaggaatgctcgtgcttcagcctcccaatttgctgggactacagaggtgtgcaccaccactcccgctaacttttttttttatttttaatttttagtagagacaaagtttcaccatgttggccaacctggtctcaaactcctagcctcaagtgatctgcccgtctcagcctcccaaagtgctggcactacaggcatgagccactacgttcagccaattgactgtgtatttcattggttagctttgccatggttcagttaaccaatcttcccttgctgtttattccagtttttccatattataaacaataacaaaaagaacatttttgtgcctaaataccttttttttccatatttataattattttggctttggcaaataatttgctaaatactaccaaagaacagatttgcagaagtgaaattatttgctcaaagaatacaaatatttgcagagcttttgtatatatttaaaactgctatccccaaaatagtgatattactaagcttattttttatgtatcaaattttacacttttacaaaagcaagtctaattcttcttcatgtcattgataattctaagccttgtgacatctctcttcctagattaaatattcagttatagtttcttcctgcatcgcttatgttactgcatgtaattgttattattgtttgttgttacagctacctgtttggtctgggtgggatttcttttggcccaccctgtgaggcacatgggctcgaatggctggcttatgactcatctggggcatgaaaattaagaataacctgggctcctcagccatgctcctgctctgaacccatcagcttctatgcattctttctgatggctggaagggcttctctttggggtgtttggggtgttaggaagtgtgagatgctgtgaggctccacggaatgggtggacgggtggcctctacatggtgtggcagaggaagcctccccccaggtggccctgctgtcatctctgcgccccagaaccctggcctaaccccaggactccacaaggcctgctgagcagccaggctgttcccccatcttgagtagccactctgtcaggtcatgcctggcgggaatgatgaactttgtgtcaactgctgattacagaaggctggggcaggtgctggaatgcctcttgggtgaagctagggaggtgctggccctgcctccccaagccaggctcacaggccttttggagtcctgattttggactcccacagcaccccgtgggacctggagatttttttctcttcaacatccatgtgaagatgcttcctgaggaacttccatgagctcagcactagggcaggtagttctggggatgcagaaaataagagcaggggtgtccaaagctggttggggggtggtagcttctggggactgagagtaaggtcagggcacaaggtgaggacagaggggcaggtgggaaatggcagcgatggcagcgctctcactgggggaccctagctgggcctgagtggagaggcccaaaaggcttcctggaggtggtgactgagctgggaaggaagcagcacaggcaaagaaggacaggctttgcaggcagggctcaaagagatggaagaagagaggggagcagccatgagcttcccaggaactgcaagtgtctgggtgaagtgggagttcaggatacccctggacttggaggccttcagacaatcacagacagcaggaccatggcagcagaaccctgggagagaaggaagaggcagtggtttctgctggctgctggagcagagtggtcttgcaggcagctcagaggcccagggactgtcatgggcagaggcatagggatcggtccttgctgaggctgggcactgaacaaggtggtgcatgagacaaagcttggagtccggtcatcatccccctcctcaagctgccaccctagctggagctggattcaggaaacgacagccctttttcctcatgggggaggtacctggctttggacagacctgaaggaggttctctccagacctggaggaggtccatggaaggcagcaggcagggaaagtggctgtcctgactagacagcaaggggtggaggaggagctggctgtggctgcatgaccttgaatgacctttgactccacaagcatagtgtctgtgtaacatgtgccttgacagttcatcttgaggtttaaacatcattctttaaatcaccctccatgatgccaggtatcctacccctcagaatgagagggcaactggctggtgttttttaagcggaccacccgcagcctcactgagacacctcttatttccaggagccaggtgtccaggtccccgtgcagctgtggtgccatcgtgtcctggatcctcgccaccttgggggcccgtcagcgcctctctggagcctacagaggcacctggcaggctggcaggcagcttttatatgcctagttagggttttatggtgcagccgggaggatctgcgtctgacaaggcgtgcatgtgactgcggcgtctgtgttcctggccgggcctgcctgagagcagagaccggcggggtcaccctggggaccgggcgccgaagctcagccacagaacaggggtccaggccatactggctaagccttgcccctcctgagatactcatttccatttgttcatgaaagggccaggctgagccaggcccagggggtggaggaagtggggcagggaggcctcctggcctgggggagctctgggagtgcccctccaatccccccagggccagctccaggtcctggaaactcagaggacaagctgcaggaccggccacccccctacccctctctctgtgcaatttgtattccagtgggcaaggtgacaataaacctataagtagacaaagtagtcacaggatcgtttctggcagggtggctctaggaaagacaggatgcagggccaactgggaggatgtgacagtggctggtggttgggctcacctggggaggaaaggcctgctgagacatgaggaagcttagtcaccaaccatcaaagggcaggcaaggggaccacttagcagtgagtttggggtgctcatggtgcaggctgcagaccagagccagggagaggcaggaggtggcagggccaggccttggtactctcgtctttggtgaggaatctgcatttctctttgattggcactgttgcacttgcagggctcacagtcatgtgagtcaggtaatcattaggggaggtggggacacagtcggctgcacacagcctagagagatcagctctgcctgggcactcatggacagggagtgcctgggaccatccccactcatacctagtgacctttgtcattctcagaagtgccctgatctggattattaattatgtggtcagcttcacgatgggcaccctcacagagggagagatagtcctgcctcctggaagcagaggatgttcaccaggcaggcagcagggaagaggattccaagtcctggaattaggaaatgcataaatgtgttgggaattgctgaaagctcggtagggataactcctggactgtcaggggagggatgccaaagaggcaggagtggggcttgagaagactccgtggagtttggactcagtcttatagccttgggttgttgagagtcacaagagagttcaaagtctgagaggaacacagtcaggcttatgtttagagagaactcggtgaggactcaggcaggggaaccagggaagcaaggagccgaggcaggggttgaggaaggaggctgtcatagtgtcccaggcaggaagtgtcagggacctgacctatagcaggatcatggggttgtagagaaggatggatatggaaaactaatgaggcgggctcagcgaggaggagcagatgtgggaggggcatcctggatggggcccaggtagggcataggactctgggtggaagccatggaaagctggagaacccaaggcgaggacagcagagcttatcttgtgcagtcagagggtggcagggatggttgacgctctcctgccaagtgtctgtacccttcttctgtatttcccggccttccttgcagttggtggaggccacgtggctagctcttgccaatgagaatgtgagcaaaagtcaagtatcacttcctgtccaaggcagtgtgtagggggtgaggtcctccacatttcccacctcgtgagctctctaagatggcagaagaacaaagtggacgctactggatccctgacttcccatttgaggaaggctgtctgacttacatagtgagcctgcaaagacagtgaagctgctgaggcttggggacttgccactactgttcatgagggtcctgtatcctgattgctcacatgaagggcagtggggcaggaggaggtgacaaggcacaagggaaagctcatccagagagaggaagaggctggttgctgtcctcactgcctgtcccagattcaccattcagggagccctcctgctccctggggagactgaggagacacggggctacagctgctctttccaatgcatttgcaaggatgagagctcttgggtgttcatttcatctctgaaccccttatggtttagcctgtggtcaaccgaggcaaggccatcctggaggaagagtcagcagccagaggactgtccagctgctgccatgaggccactgctccccaggatcaaccactgcccctttattcatgcacctagcatccctggcgagcaatttagcttctccccatggaagactctaaaatgaatcagaagggaacagtacaacctaatcccaaggctctaccaaactctggacttttaattatagcaccattctgggacccattgaatttagaaaacagaggcaaatcctcagctactagggcagttaatccaggcaaagcaatgctctcagctttttgtatttagtgaaagccacattgaggttactgttgtcaaaatctaaagcagagatccagtgacagctgagggaaagaaagtaaatgatgtttattgggtctgttcggcaaaacttccctcctattcttttgttgttgtttttcctttcctagtatctttctgtagatttttgtcctgggaaatcccacttaaataaagatgtggagtttagtaagttccagtcttctggggtgcatccattgtccacatttatcttatccagtgctattctcccaagtcaaatcttcccctgcaaaaggtaatttccatcttagcaacgtttaagcaggcctggactccatctgtcgctgtcccacctggctatgctttgggaatcttgtctcctctctgaccatccttaacatcccagtttgaaacatttcttcttgggcttttccctcaaggcatggatcaccattacactctggaactagcctagcttccagaatgcctactgagaagttcaatgtcctttatttctatttatttctgtgtaacctttcttctccagttttgccctctggaagttttaggatcttcttttgattccctgtgttctcaatcttcatgctgatgcaccctcatggatgtttctgctatacattgtgctggccactgtgtagactctttctgtgtagaaacacatgtccttccaatctaagaaattttctaattattcccttaggtttcttacacttgtcccccgtttccaatctctctctctctttaaatatttatttagttgttcaacatttattttacatccaggggtatatgtgaagatttgttacatgggtaaattgtgtgttgctgaggtttggggtatgaatgatcccattatcaaggtagtgagcatcatatctgataggtagttttcccaccctgcctccccttttactctccagcttcttgcagttcccagagtctattgttttaatctttttgtccatgtgtactcaatgtttagctcccatttataaatgagaacgtatggtatttgatttcctgttcctgtgttaatttgcttaaggtattggtcaccagctgcatccatgttgctgcagaggaaattatttttaatggttgcatagtattccacagtgtatagattgattccatgtctttgctgttgtgaatagtgctgtgatgaacatacaagtacatgtgctttttggtagaacaatttattttccttttggtatgcacctggtaatgtgattactgggtcaaatggtagttccgttttaagtactttgagaaatctccaaactaatttccatagtagctgaactaatttgaatccccacccacaatgtataagcattcccttttctctacaacctatccagtatctgttatttattgactttttagtaatagctattctgactggggtgagatggtatctcattgtggtttttatttacctttctcaaaacattaaaagtcacctatgacagacccacagccaacatcacactgaatgggcaaaagctggaagctttgcacttaaaaaatagaacaggacaaggatgctcattctcacttctcctattgaacatagtaatgggagtcctagccagagcaatcagggaagagaaagaaatagaaggtattcgaataggaaaataagacatcaaattatctctctttgcagatgatgtgattctatacctagaaaaccctaacgactctgccataaggctcctagtctgataaatcacttcggtaaagtctcaggaagcaaaaccaatgtacaaacatcagtagtatttctatacaccgataatgttcaaattgagagccaaatgaagaatgcaatcctatttacaatagacacacacacacacacacacacacacacacacacatcctaggaatacatttaaccaaggaggtgaaagatctctataaggcatactacaaaacactgctggaagaaatcatagatgatacaaacaaatggaaaaatatcccatgctcatggatcagaagaattgatattgttaaaatggctacactgcctgaagcaatctacagattcattgttattcctatcaaagtaccaatattgtttcaaagaattagaaaaaaaaactattctaaaattcatattgaaccaaaaaagagaccaaataaccaaagcaatcctaagcaaaaagaacaaagacagaggcatcaaactatccgacttcaaactatatcacaaggctatagtaatcaaaacagcatggtattactacaaaagcagacacataaaccaatggaatagaatagagagccaagaaataaagctacacacctacaaccatctgatcttcaacgaagtcgataataacaagcaatggggaaaggactccctaagccatgtgcagaataataaaactgaacccctgcctttcactgtatacaaaaattagctcaaaatgggttaaagatgtaaatgtaagatcccaaactataagaatcctagaagaaaatctaggaaataccattctggacattgcccttggcaaataatttataactaagtccccagaagaaattgcaaaaaggccgggcacggtggctcacacctgtaatcccagcactttgggaggccgaggctggcagatgacctgaggtcaggagttagagatcagtctgcccaacatggcaaaaccctatctctactaaaagtacaaaaaattagctggtcgtgatggcaggtgcctgtaatcccagctactagagaagctgaggcaggagaatcacttgaaccatggaggcaaaggttgcaatgagctgagatggtaccactgcactccagcctgggtgacaagagcgaaactgcatctaaaaaaaaaaaaaaagaatgataaagaaaaaggaaaaaaatagaaattgcaacaaaaacaaaaattgacaagtgggacctaattaaactgaacagcttctgcacagaaaaataaactatcaacagagtaagcagacaacctatagaaggggagaaaatattcacaaacaacacatccaacaaaggttgaatatccagaatttgtaaggagcttcaacaattcaataagcaaaaaaccaagaatctcatttaaaaatgggcaaacgatatgaacagacacttctcaaaagaagacatacatgtggtcagcaaatatatgaaaaaatgccgatctttttttgttgcagttctagtttctggcaaattttttaaacttttatttccaaatgtctttgttgtttaaaagattttagttattatgtatttttatttctaataatccttttttattatgagtttaattcttataccttcttgttcttttttaatgcaattttttttcctctggcctctctgagaatcttaatgcaagtctattggaggtcttcttttgcttcctgcatcacctctgttttatttggcatctgtctttcatgctgcagactctcctcaaatgcctgaggatcctttgccattcattcaaattgaagagatagtcactaggaacccaagaatgaaacaaaacaaacaagacaaaatctacaagaagtcacaagaaagttcagtaatgtggctggatatatttcccaaaagccagaaagcttatagaaatgatatctaactagaaaaatagtaggagatcagatgtcactcacaatgagggacccaggaattatgctagcaaataatagaaattcttttgtattagtcagggttctccacaggaactgaaccaatagggtatatatagatatacataatagatagatttattatgagaattggctcacacatttatagaggccaaaaagtcccatgatctgccatctgcaagctggacacccaggaaagacactggtgtaaatcaggcttgaagttcagggtgctcatgatgtaagtcccagattgagcccaaaaaccgagaaccaggaccaccgacgtctgaaggcaggagaatatggatgtcccaactcaagcagagagaatggctctcccttcctctgcctgtttattctaatcaggacctcgagggattggacgatgcccacccacactgggaagggccatctgctttactcagttcctccattcaaatgtggatcttttctgaaattaccctcacagaaacactcagcaatgatactttaccagctgtctggacaccccttagccaagtcaagttaacacatcaagttaaccatcacagccttcttggtgacaacacgaatgcctcattaaaatgtctaagataagaactgattcatacatggaaagaattagcattgtattcattttagtcctctgaaatttaatctataaatccaatgcgattccaattaaaattctggaaggttttgtttaatgaactcaacaaaatggttgtaaaattatacggaagaataaaagtgtatgaataactaacacactttgaaaaagaagagcatctattaaaaagtcagtagggttagataggaggaataaggtcaagagatcttactgtacaacatgatgattatagtaaataacaatgcattgattcttgaaaattgcgcagagtagattttaagtgtctcatcacaaaaagataagtatgtgaagtaatggatgttaattagctcatttagccattccacaatgtatacatatttcaaagcaacatgttgtacatcataaatatatataatatttgtcaactaaaaataaatttaaaatccactagaactgacaaatgagtgtaacaaagttatacaatacaagcttaatgtaaaaaattgtgtatctaccaaatcaaaaaatcagaaattaaaattggaaaacagccccatttataataggataaaatgtgaaacatctagggatacatctgataaagaaagactaggatactgacaattctaggtcattgttgagagaaattaaagatctaaacaaatggtgagaaacactgtattcacagatcagaagacttaatattaagatgtcaattttcctcaaattgatttacagattcaatgctatgctaataaaaatctaaaaggattttttctgtaagactgagaaacaattctaaaattcatatggaaattcaaaggacctggaataaccaaaaccctgaaaaagaagaacaagtttggaaaagtaacatttaccaatttcaaaacttatggaactgcagtaatcaaatcagtgtagtatttgtgtcaagacagacaaatagactatggaacaaagtaaagagcccagaaatggactcacacatacatagccaactgattttgaaaatgatactaagacaattcagtgaagaaaggatagtattttgagcaaagggtgatggagcaattgtatatccatatgcacaaaaaaactttgattcacacctcattctcatcatgtatgtaacaaaaataaacttaaaaggcatcattgacttacaagtaaaacctaaagtataaactttctagaaaaaaatttctagaagaaaaataggagacagaaaataagagattgggagacaatatttgtaaattgtgtatctcataatttgtgttgagaaaatattaaaaactcttaaaagtcaacaataaaaaatatcaacctaattaaaaactggcaaaagatctgatcagatgatttaccagtaaagttatagagatggcaattagcatattaaaaaaatgctcaacagaattagtcattaaggaaatgcaaattaaaatcacaatgagacagcagtcttcctctatcagaatgtctaaaattgaaaaaaaaattactgacaatatcacatgttggtgaggatgtggagcaataggaactctcattagtaattgataggaatgcaaaatggtatagacactttggaaaacactttggtagtttcttataaaactccacttgcctgatgacccagcattcccacacctaggtatttactcaagtgaactgaaaacttccttccacacaaaaacttgcaattgcttgtcgtggtgttactcataatcaacaaaagctgggaataatgaagatatccttcagcaggtaaatggatcaacaaactgtggtatgccatgcagtggaataaaactcagaaataaaaaggaataaactactgacttaataacaataaggataaatttcaaatacatgtgtctaagtaaaagaagttagacccaaaagatgccactgatgtgacattctaaaaagagcaaaattacagaatgggaaggatcaatagttgccaggagctgggggaggggagaaggtttgaccacaagagggcctcaatagagagtgtttagggggatggaacgttctgcatgctactcgagtcatagatacttgactctatgcctttgtcaaagtccgtagaactgtacaccacaaagagtgcacctagcattgagcgaagaaggtaagaaacagaatgaaatatctcaataccatatatgtaaattagaaattcgcacatgtacaatacaatatatattttaagaaattatattaagtacatcataatgactgcttatggggagacaggattgtggcttgaggataaaggggaaacagactaaaacaacagagaacgttgcatgggccaatggtgagagtgtgtgctgagctgagaagtttcatgaattcaaacacgtctatttgaaatctaaacaaaacaaaatataaaactaaaattcagaccaaggcacaaaaagctgattggacactctgagtcccaggcatgtgtgtgagtgagggctggggctggtctattgagagccttcccagtagtgtgattaggagggacctggtcatccattgagggaccccaaatgtcaattcattttctcttggacagctctggagcttccatctcctcttgggggaggggcagatgtagctgccaggcttaagggagtggaggagggaaagggcggaggatgcgaaggctcatctggaagttcgcttcgtcccttttggagtaaggcacttacacaagtccttagcagtaactcacgtccctgaatccagagcgtcttctctccaggttccccaggacggataccgcgagtgatctgagggctctgggaagaaactcacctggttctgctgggtatggagaggataggagaatgcattttttcttattcagagttccacaaaacctctgtttttagctccacatctcattctcacctttatcgttcctggaacctccaattccagagcccttacaaggtgttactgagccagattgcaggcttcttactgtcttccttgctgtaggcttagctttcacctttctaacttctccaaattttgacatctcttatccgctgccacctctatttttcttttctccttcatagatttatggattttaattccatttagccattttactggaattttgggaaataagtggacacaatgccacttttatctgctatgtttgcttgaagacaacaccatgctattttactgggcctccattttctcctccttaatgtgagggttaatggcactatggtgaaatgaactcaggaccacagccaggtgtggaggagacaggacaagatgagaaggtaaacgtacctagtttggattcccggctccactgcatactgcctaggtgagtttgagcaagttgctcacccttcgtgagcctcagtttcctcagtagtaaaatggaggtgttcatactgcttctacccagttccacaaggcatatagtaggtgttcgctctatgctatttttctttccctaagggaatgcataaaccggcagtctcaacactatcatggagaaatttgttatacgtggcaattatggcaatggaatccaaatgagtgtctgaagcagggcagagtccagtgagaatttttcctaagcaaagtctctcccactcctctgccctgttgctcaggggtggaagcagattccagactcactatctgaactctgggggccatcaggagatttccggcaaagctgggcttttttccatgcacaagcaggagcccataggtctgagtaccatgggggcaggagggaggcagcaaggagccctttccttcgtgtgtcttggtgtgggggtgggtgggggtgggttgcccactgggtggcaactgataacagaccttttaggcagagaacaggagttccttgaaatcttgagagttgagagattccagaaagaccttgccatccagaagaagtgatacatgaggttccaaatatgcatgttccctgggtcatttttttgcttagctgcatgcatgtgagatgtgagccttatgtcacaagggttccaatggtgtgatgcatcttagatcttgtcctggttctgccaggaatttgggccagccacttcctccctctctgagcttagttttttcatttgtaagaagggcaaatacacagcaagtgcacttctcatgtgcacagctccagtgatatctggtgtactttccaaatcttcagatgtgtttggaacactgagcttattatatatccatcttcaggttgacccagtggaagattctgcaggtaattattttgctgatggcttttaatcccttaacagacagatattctttctgggaccatgacactgttgtggcacaagtctgtggggtctggaagcatacccattgtcaaaaacatcctcttttggtggtgataacagaaaaatagtagtgatgatggagaaacacagagatgtttgccaagtcctgccaggtgcaagtcatctcatcatcctgacacaggattgccagtgtctccgtgatcagtaaatgggacacatgtggcacttgtgcctctctgtcatggggccagacccttgggaagagtgaggaaatcatttatcctgtgacggtcaatgtgagaagagatggaggtgagagtgagaggacagagggagacctgatcaggtgaccatctgcctccttttctggtcagtgatgctccttcaatgctgactacctggggctgagaacacacatggccagtcaactctctgggtcctccatccatgagcttcgtcatgagacaccccgaggatagacattacctcccatgcagcaccatgggggatgctcggtcccctggagaatggccagatttctctggggctttgtgaggactcctgtggacagggcaagatgaagcttggaccaacagctgcatcatggagccagcacctccacccccaggcaactttctgtggattatgagtctttaaattccattgagtccc[450 bp omitted]ctcccaacctccaccctcaagtaggcctccgtgtctgttgtttccaactttgtgtccacatgtattcaatgtttagcttctacttataagcgagaacatgtggtatattgttttctgttcctgtgttaattcacttaggataatggcctccagctgcatccatgttgctgtaaaggacatgatcttacgcttttttacagctgcatagtgttttatggtacatgtgtaccatattttctctatttagtccactgttgatgagcatttaggttgatttcatgtctttgctattgtgaatggaattgcactctttcatatcatgattttatattttttactggatgcataaacatattcccatgtgcttataaatttttcctacagatcgtggctgaggacatacagtagattaattggccaatcctctatttttggttaactggtctattgtaagcttcggctgttatgaataatactgaagtcaccatttttgtgtattttttgaaaacccaggatcaattctttagggtcattcccagagtggagtacatacacgtttaagttcttggtttcctaagggagaggccaaccttaggattccaatttccatgtgcccaaggagagcagcatgagttctctgctcacaaaactccttgtccaagaccagcagattggtctgagtctgactatgagctatattactagcctcctcctcccctccccgcttcccctctatgttcctctcttggtgagggctgtgggcagcagtggtctgtgggggccctgaagaacattctgggctgggggtgcttccttaggcttaaacaattccactggaagctattgcccctgagcatgctggtcccggcctgtggaaagcctgtcaggccaacacacgtgagcagcctttgttccccagtgtggccccacagaaacagagtgactaatgagggttccttcctgtctcttcaaagttcagcaggggctcccaggttcaaaggacggtgtctgactcactttttcccattccccaaaggcaactgcaactgaacaacactgaaaacacctcctaccctgcccaaacagaccccatcctggggggattacttagtccagggcccaggcagagctggcaaaaacaacagcatccccaccagggataggcacatgctgctttgggaaggatgcctcctctccagcccagaggccccccgggggcgtcagactcttcttccaacctgcctccggcttcgtccttcctcttcagttgttgcatattctactgttggctttaattttcctttgtatatgagcactggagagagggctggtctgggagtccccatgcctgatggtgaggccaggagcctgtggtcaccagggcttggtcaaggactgggaaagtgaactttactagaggaggacacatttttcaggagaaaggaaggttccaagccaactttgcaacctcacagacttggctgtgtagctgagcttcatgggaaggtcccagtgttgtcatgcaagaattgtggctgcacttccatacccatggttggaggtccaccctcaacaaagacttccatgctggagcacgggtgacaactacttggccaccattagaggcacataccacagcctagcaaaacaatctgttgcatttgtggaccactttgttcttttcacttacttcgaatctttttagaaataaagaaggacttaggtaaataattatcctctttcttatgggaacaaatcgtctgtctcccagaagagtccacccactgtccattcttccacccaaaggagccagcagagcaaggtgagaactttctttgcatgcaatgagtccaatgtttagatgtcccaagtgtctgtcttctttccggattaaacacttctcttccttcacttgtttccacatgacctggatcctacctgctcactcttcctaggacgagtccctttccctcatagaatgtgggtggaaaactacacaagtcttcagtccaacccccagcaccccaggggagctactggtactcatgctctggataccctgtgcctccagactccatcacactccagccttgcggagtgtgggcagccacagcccaccatgctcttagacccagtttacactcagtgagtatccccaggtgtttaatatgaatatctgggctactacatcaagacactggtcttctctccatattcaagttttcttgattgtattttatctcaagtctatttagaagactggcactgaagagaccaatcatctccaacaaatctctatgatcacgacataaaatgtaattcctggagttgctgccaggcatagtgacgcttgtgaactgggaggtgtgaagatccacatggaccttccaaggtatgtgtgagagatggggaggatgggagtggaacaagctctgtgcagctgggacttgtttacaaaacacacagcattgcatcaatattgacccatcacaattccctactgattaaggacataaaccatgttgcagaggaagctttaaagaaatgcaagcaggtaccttgaaaagatgttcccccaaaagtaaacttttcaaacagaataatattgacaactttctcggtgttccttgacttcttctcactgtctgtgctgctcagagctccatctttacaaagccactagccttgcagctggtgctgattaggagagcgttgacagcatggttttctcttcctactaactatggggttggaagcaaacattgattgagtttttactaggtagcaaactcctgctaggcattctacatacttgattccaccaccactggtagtcttcactataacactgtgaaatatgctcttttctccatttcatttacaggaaagctgagggtcacagaggtgaagtcatttgcctatgttgacaaagctggtcatgacatagtttggatgggaatgcagagcttcttgattcaaaagcccatgctttgtctactgcttcagactttagaccagtgctgtccaatagaaatagaaggcaagccacaaatatgaagcaaatgtgtcatgtcgtattttctcatagccacattgaaaaagagaaaaccagataacattaagtttaatcgtatgtgctatttaacttaatggatccaaaacattagtattttaacatgtaatcaatataaaaattatgacttttatattctgtttttgttgtaagtctggaatccgttgtgtaatttgcatgtgcagcacatctcaattaggactggccacatttcaagtgcttagtagccacatgtggtagttggctaccatattagacagctcagctataaaatataaaaatagctgctttgtttttctctcctagatattctttaaagagaattattttttaatgtttttcattgcatttgaatgttgtaagaaagtcaatgaattattaatgagtaagaataaaaatagatttttactcaaattattctgctcaggctgccataacaaaaatcctacatactgggtggcttaagcaacagaaatttattttctcatagttctggagggtgggagtgtgagatcaggtgccagcatggttgggtttgatgaaggctctcttcctggcttgcagacagccgccttctcactgggtcttcaggtggtggagagagaaaggtgtggtatctctttttattaaagctctaatcccatcgtgagggccttcactcagacttcatctaaccctaattacctccccaagtctcctccaaatacaatcaccactgcaggctagggctttagggcttcaacataggaatttgggggagacgcaaacattcagtttacaacatcactgaataaaacacaaggtaagaaaatttctcacagtgctcagtgatgcaaaatgtcctggggtaacctctgaggataatgtagaaacttccgttagtgtgtattgtgaggccagcatgttgcaggtatgcccctgcaaagtaaagatttccatgaaaaccctactctttacaaatctacagtcatgttttccttaattcttatatcaaaggaggcatctttaacccagtttttaagactcagacatggaggttctgagattgagtgatatctggaatttctacagaatatatttggaacccaagacacaaaggtagacagagcaggagccaggtcctcccccacagccttctgagcccaggctgtctcctatggccagtgcctgctgctttgcttgggaacagttgctgatggcatgttgctatctcccatgggaactgaggtcagcctggaccctgttctacatacatttgtctttttgtccttttcaagtagcacggagctttaacaggttttggtttattatgtgagccaagtgcttggtggcttggccagcggtcctctatgctgatgcccagagagacaggatctctttgcacatggtgggggatttctagagcgagatggctggggggcagggtgggggtggggcgggagcggggtgcggaggcaggcatttgaacaggtcccccttttgttgtgatttgtattgctagtttctttccactgggtcttgtggtgtctcttgagagtggccgtgagcccagacagccactctctagtggagctctgatgggggaaattaggttcaggtgtgtgtgtcaggttagacacagtgaagaagtgaaaccagaatgcatgaaacagggaaaacatttcactcacaggcctcacagcagatggttgcacactagaggcctacaggaagtcaggaggtggcaggcagcttacccagtgggtgaggaagagagaacacttgtgggactctgcttttattaagactcatgggcattatccttaggctttcctttggggttgtggactgactggtttaaagaaaacactcttgaagtggggacttattttcctgactctggcatgaccatttggtgttattatggtcaggtattggattttgggtcagtgggatgaggaacagccacacggggagaggaagttctgagtctaaaggcgactgggtacaactgagttccaaacagcttatgtcaggcataaaaatggatgctgaggcagcgattatattaaacaaatttatgacaatcttgttattgaagctgctgttccttcttttctacatccttcaaaccttcactagagactatctctgtgagaccccagctgggtcaaaggtgcacagcgatggagtggcagatccctgctctcagctaccatagcatggccacaggatgaggagagaggcagacacactctgaaatcaggacacgcgtcagcaagcattggcttatcagcaaacgacagcagacaagagctcctggggctctggggaaatgctgctgcctgctggccaaacgaactgatggatgggctcttggagtgggagagactgggcagaagctgtgtggggtgggtgactcccaacctaaagaacccactgagacatatgtggcttccctcttccaccttcattgcctctttccgtctagatgctggcaaggggggacttggtggacaaagagagctactattcattcaggagctatgttacaccagtcactttacatgtgccacttgctctgggttaaactgtgcctcccctcactcatatgttgaagtcctaaccctaactacctcagaatgggacgttatttggaaatagggtcattacaggtcattaaggtaggctgataatccaatatgactggagtccttataaaaaggggaaatttggacacagacaaacatagaaggaaaataacatgtgaagataaaggcagagatccaggtgaagcttctacaagcctaggaatactaaacattgaaatcaaccaccagaaactcagagaaaatcttggaacatattctctctcacagccctcaggaggaacaaaacttaccagcaccttaatctcaaacttccagcccccacaattgtgctacaataaacgtctgttgtctaagccacccagtttgtggtgctgtcttacaacagccctgggaaacaaatccattatttcactgaatctgtagagcagctccatgaagaagataatattgtgcccattttatagaggaagaaaacaaggttcagggaagtgactttcccaaagttatggtttgaaaccaaatctgtctcacacccaagcccactacatcctcgtcttccagccgggatttgccttcagccttggtgtcagcactcaagtggggggcaggcagattagtccctcaggaaagcacttgtttcttggaagtacagtctcctgtaggttctgaaaggcaggctgatccactggaaacaggagccatgtatcacgtttcagaaatccagctcctagacaagccccctcaacccgtccccctgagccctgcccagaaagctcccagcatggacaatgtgcatttagctcaggcctcctcctgacggagctatgctcctgcctcaaaagccacctcagatggaagtcccctcttggatgacagaaatgcccactgacacagacatgcaaatgttccattggaggttcctgagtttcacccagtcctgttataggcaggcatatcttttcacctgctctatgaaatggaatggaaagtggagccgaaaggcagttgtattgaccctgcctttcattcactttggctccataaatcaaagagcagtcatgcagtcaggcccccagtaatattccttcaggatgtgccgcaggcatggtagattgtacttactgggtcaaataaataccttttcatctgtccgtaatataggtagctatattactctttgcagtgtttctcctattaacttgatctaggctctggagtgattttcctgaagccatgggatgaaaccaggcatgtttcatgcctcctcctgtccttcttcaactcccctagcaggaaggcatagggcacagcccaaggtccagcctacaccaagactagctaggacccccagcaggttcacaaggattcaggacaaacgagaaacactgctactaatttaccatgaaaggtgtatcccatggactccaattcctttttacttttagttttgcttagaaactggaaaagcaaaacatgctggttttacaatattgcttgttacagaggtatataaagtctaacttgaacgtacccacctccttgcaattcaaacaaatttaaaagagaaattgaatcataccatatagagtgctttgcaatcaccttttcactaaggaataaaccagccgggcgaggtggtgcatacctgtaatcccagaattttgggaggccaaggtgggaggatcgcttgagcccaggagtttgagaccagcctgggtaacatagcaagaccccatctctacaaaaattagcttggctgggtggacatgcctgtggtcccagctactggggaggctgaggtgagaggatcacttgagcccaggaggcagagtttatagtgagccgagatcatggcactgcactccagcctgggcaccagagtgagatcctaactcaaaaaaaaaaaaaaaaagaataaaccaaaccaaggagccttttagatcagtaaatatagttccattaaacactttttacttcctcctcagttttccatattttgttttgttccatattttggttattttggaagtaaatattatcccctgttgatactatttagattgcctacactttggggctgctataaataagtcagctattaatattttcatgcttttgtgcaagtatttctattaagataaatactgagaaataacatttttgagtagagaaaactctcacctcgaatgctgggagatacccttcaattcagctgaaaatgtcacctctttgcattgtccagtgctttgtaagagaccccattttcccacccagtcacaccttggatattatgtatcatttatgtatttttgtgctaacctaaagggaaaaatggaatttcattttttccatctgaagatttgtgagaatgagcatcttattctatgtttaccagccttcctctttcttctgtgctgtgacccttaagaacttggcgctttcacttttcctattgagttgtttcaagttttgtggttaaattagtcagtcttctgcttttaaaacaatatttctggtttcctgccttgcttacaaaatacttcctttactcaagattggaagactcattgtcccagagttcttggttgtaagcaatagaaacttactttattaaacataggcagcaaagagacttagaaggataacggatgtcttagtaagagattgtagtgtttagaagcaacccttggacaaaaggccaggatagagggatgccagagagccaaaaacaagccaaatggtgccactggagacattgccctggacgcttgctgccaagaggctgttctgattctgctgctattgtctacactagactctgggtgctgggtgctgccatcctaccatcacctccaccacctgctcctccaccaccacccccataacaccagcacctcccgccacttcccctccatcccctcctctggcatctccaccatcaccatcaccataactagagtgaattctaaagtatcccctgattctttgcagtatgagtttcagattcagaatcctcagtgggagtctttaattgttcatacgcaagctttcactgtcaagagtcaaggagaaaaatctaatatttgtgttcatttggggggaattggtatcctaataatattaagtcctcccatctaggaacatggtattgttaccaagcgatcaatgggcttggtgtccaattcacatagaggccaatgccatggcaccagcttttgagaaaagaaaaacagcaataaagctgcttaatgggcaagaaggcaagagaaaactctcaaacctgtctcctcgagcaggggtttgggtcaggctttataagcatagggtaatgaggtgtgatctgattggatcttgcaatgaggtggtgccaggaggcatgatcttactggatcctgccatggggtgataccagagcttcctctgattggatcctggctcctgccaggcagtgtctgcttctcagttcagtcccaatttctcagtcccagccctgaggttcctcctgtggctgtccatttggttcgcctgagcacgctcagattacatcaccttcaatctgggggcccatggtaacctgaaaacaactcacaacttggtttcataaaagttgaaccacataggtgtgatgaagttacagtaggtgctaaaatctcccactgtgattgtgagactgtcaaattctaggttttggaatttcaacaatgtagtcacagtaagtttcgttaatgagatgccagtcttacttattagtaggtgatgatgttttctgtctcatgtttctgattttctctttattcttcatgttttaaaatgttagatggttttattttttcattaatcctaacaagatatgtgagtcactttaatctgaagttctttctccttgtcttcttaccctacgttctgacagatttccttgactttatctttcagttcatttactgatgatcactttgaagacaggaattggtgggtcacacttataatgtctaagaagatgtattgccagaagattctttaatgaatgtatacgtttcctgaatttctgagaacagcaattagagtgctttaaaagttttccttagttcatcgcgtcatctaggtgcttcgtgcctcttccctctgcccttcccagtcttcacggctacatgctgactggctcttctgcctggtgcacccttgtttgagaactgggctggttcttccagatggctgctacagtgggttagttcctgcagtcctcttctccaggaggcttctgagggctgagctgactgcttggagctctgggtacctgggctcatccgctggcagccctgcctagggtgtgcaatggacagctggtcttgaggtggaaggcatggctgctaaatcagtagttgatgtcagaaggcaggacagttcatgttcacctgcatctcctccagcccctccagctgacctgggctgtgcctggctgccagaggaaggccccttttcctgtatccatttgttcagaggagctgacaaatggcttcctctgagttcccaatttctgctgggattttccattccatcctctggcctgtgccagtagtaacattttacacttgtctgacaccttttctcctctgagctccaagcactttacaagcaagcagttgctattattgccctctgaattctgatggaaaagctgagagtcatgggatcaaagccgccatgattgggcagtgaagacaaggctcccagacaccaggccagtccccggcccttggcaggaccacatagagcaccccagctgctgaggtgaggtagcccaggggagggttttcagcacgggctccctagaggctccccagagccgtcttatcctgttgtaaagtgatgcattgtcctttactgcagaagagagtgggacccttgggactcttccctgccagaaaaagtgggctgatggttcgtggtttattttgggaatgagaagactcattcaatctgtaaagggtcctcatcttgtcttgaggaacaggaagcagatctgtattacgtggcccaggcagcggaataaggttcagttgctacaggttttcaccagtcagaggacttgttagcactgagagctgcccaaaggggagtgcgtttgcgtccctggttgggtcccgaggcaagtgtctctagctgctgctggggatgtcctgcatcacatgatgctagggaagggtgacacatgaggcctcttccaacccagatcttgcatcataaggacacactctagtgctatctcctctaagtggtggtggccttggggctgaaaccctgaaaccctgggtcatgtcacatcttgctggatctgcaaagctccttagttcccatctcctccttctttcatttagcaaaactcggtttgaggtctgcattttccctcttttgtacgaagctttgcccagtagcagcttactgtttaactggaaggaacatctgtgaccatgaaattttcagcaacctaaaaaggccctgttaagtaatatttgctgagctagtgttgggagtcagcagtgtgtgtgtgtgtgtgtgtgtgtgtgtgtctgtatgtctgtgtgtgtgtgtgtctgtgtgaattcagctgccctcaggcaggtggctggaaactggctcacctttatctgagaacacatcaatcttgggaagagaatccatggaactgagtatggagggacacctggccagaaagaaactgagaacaagtcattcctaccccagggaccacagaaggaggcagacagctggaggaatgtggtgtgtgtgcgtgtgtgtgtgtgtattagagaggggtagaggactatattttctgggcagatagaattctgagcacatctgtgtgtgttaatgctcacatgaaacctttcaaagcttggagagatgggtattatgattctattttcccagtgagggattagaagtcaaataagctgcccacggccccagccccggccagagcagagctgggatttgaacccagttagttgtctttggctctgaagccctttctcctctgtatccctgcctgccttcaatgcaggtgccacaaatgaggtcccacggaccctgctgactggctctgagtcttccggctagcccggctgtcccaggccccaagtgctctttcccaagggctggctgccttgcaggtctccagaagcctccgggtccacccccatgcctccccagatgctctagagagctctgggcccaggcccaagcccagcagggcagccctgtggtttgcgatctggccatgcatagctggctctgagcaggcacttatcattcttccacgaccacccagtcagtctaacacagcctggaagtgcagctctagctgcccaggccggtggtggctcagtcctcactgagccctgctgctcccactcgctgtctgccacccccgctgtagccggccccgcctgcccagctgagcgagaggtcgctggagcccagaaacagcagggtctgagcatccctagcaaaccacaaagggagattcacaaatcaaaagggccctagagaacaaagctgtcacatcagtccatcatggagtcggatctcaaaatatcgccaggccagagtcctgccagctgtgagtcaccacccggccagagcagccgcagcgggcccccagccacatggaaaaacacctcggcagccagctggctgctctctgcccagacctgggaggtgtagggtgtctgtggggtggttccacacctccatgctgcggtgtggagaggagtcagccctggtatgcttgctgtaggagcaggagggaggggacaagggaacggccatatcgacgatggcttctgtcttcctaaggacgcagtccaggcctgcttcatccctccaaccctgctccaagcctctgggataaccagcagtgtgaggctggttgacgacagtggctcagcacagcctttgatgtcaccctttttatgcctccctgtggccctacactgctggcccacctcttcccaggtgatgagaagttggattcagggcctatgtaagtccagcatctcatcgcaccaatgcctatggcaatgcacagaccaagagcctgcacttggtgtgctgagtccctcttcatgcactgctccagttcctaccccaagccctatcattacacatggtggggaggggcatgggggcacgcacatagggatcacgtccttttgtaggagtttaggcattctcctgacattgcttctctctcatccaccatcctgagacctcactccttccgatcagcatcctttgtttctcctggctttgaggccatgacacgtgtgtctataaatatgaagtggcctggatgacaaaacacaaagttttgaactgatttttgttgtcagctcattttttccttctgtgcctcattttccccacatgaagagtaagacgagatcttacagagacttttggttctaaaggctgagggttttagaatttggggtgccacctgccacccctccctgagctggagccatagcatattctaacgggcttcatctttagtgaactgaacattaatgaggaacattaatgttttattcgggcaaggaggcaacaaggactcaatttaagggaacatgagatgtcagtcccagccccttccattctctgagcccccttgctgtcttgtccttggcgctctcctctaaaccctggccttggggctacggccccatcagagctgaatggggtcacctctgggctgggtagagcctgctggggcacagatttgaggcttcagtcacctctttgccctgcacaaatgaccagagcctgccttgaacttctttgcttgcagccagagtctcctgccctcagctgggaactgaccaggtgggggtgcaagctgtgatgccgttttccccctctctcctgctgttcatccccatgcagcccctctccaccctgcccacggcctctgcttggctgttctgggccgctgtgtgatcatgctttcctccttggaggcattcatgctgaaggcatggagagaacccgaatggcagagtcctgtccactgtgcagtgatctctgcagacctgggccaagaggtccttagagagagggcatgggcctcagccagcaggatgaaggctgctgagcagcagctatgcagaacaagcataagtggtgacatcttccctgtcccagatgccacagagcgcaggggtgtgtccagatatgtatgttcctaggtggggtgacagaagaccactggccacctgccacctaccacccctccctgagctggagccataacaaattcctgagtacccagtgtccctctacccagcagtcagagtctctgagagctcaggtacacctgggtccattcgcaagttcataggaaagggcatgagtgtttgctctccggtgttacatgccttccaaggaatcactaaacttaagctagaggagatttgcctcttatgattgcccattctttcccctgtgggtccccccaccactcactttatttagttatcgtattcagtaaatacctgtgagggatctggaattttccagttggcatagacaccatgcattagtttgtagccacccaatttgagggatcctgagtgtcagagataactgtgatcctataattaaaagttcctgcttccccttttaagcataacgtaaaaattctgtttaaaaaattaagatgaaattcacataacatataatcaactgttttgaagtgcatatttcagtgataatatttaatgtgttctcaacactgtgctacccccagctgtctagtttcaaaacttcttcctcaccctacaaaaacacctgtattaactaagtaatcattccctatcccacttcctgtcatgccctggtaacctctaatctgcttcccatccctgtggttctacttattctagatatatcatataaaaataaacacaacatgtgactttttgtgtctgtcatcttacagcacttagcataatagcacttagcacttagttttcttggtccactcatgaaccttttcaagatttttccttttttatagctgaataggattccatcttatggattagccaaattgggcatgctttcatcctttgatggatttttatgttgttattcatgaataatgctgctataaacatttatatacaagattttgtgtggacggatgttatcatttctcttagatatatgcctaggagtggaattgctatatcatatggtaactctacttttaactttttgaggtactgatgaactgttctccaaaatggctgcacaattttacatttcccccagcagcataagtgggtttcaacttcttcacttttttaccaacacttgttgttggtctcttcaactcaagccatcctggtgagtatgaagcagtgtctcatagttttaagttgtgtttccccagtgactaacaatgtcaatcatcttttcatttgcttattggccatttatatagcttccctggagaatgtctatttagaaatttgcctatttttaatttttttattattaagttataagaattctttataaattatggatgttaggcctctatcagatatattatttgcaggtatttgctcccattccatagcttgccttttcatatccttgataatggtctttgatgcacagctgttttaagttttgataaagtccaatttatctaatttttcttttgttgcctatttatttggtgtcatatctaagaatcctttgccaaaactatgattgttatatattctcatattttcttctaagagtttaatagttttagctcttatatttaggtgttgactgattttgagttgatttttgaatacgccacgaggtaggagtacaaatgaacctttgcttgtggatatcgagttgctccacttgaatgggcatgtttagagaaaggataaataaataaactgatgtcttttactagttagataaacaaaggtgtccatatagagatacatgtaaactggttcacatttttcatgttcagcattgttgcgaagttataaaataatgtgtgtaacactcatgtagttgaataggacctaatggtgccgccgaaggtgaatttaggagacataaatgattagaatctttggcagaaaaaagtacaggaatccctcccttcatgggggctgcactcatctgtgtggcattttctgttttgctctgaagccctgcatgacgtctcagcccacattcaccctgggtgtgccagtggcaactgcctcgttgctgggtcattggggcagacaaggccagccctcagagacagcttctgccctgggaaggcaaagctgccaccctggagcatctcccaggggccatagtgccttgcatctggctgcggggaccagccctgggtctctccctattagtggaggactagtctcagatgtcaccaccgcatgtctggctattcatcaatacaggagagtgctgaactgagaatgtgatttttttttatgggttcacatcccaggaacagggtcatgagctccactgagctcagttcttaaatagtcattatcctaggtggccacccttgggagtgccctctgggacttaagtcccttcagtgatctcttgcttgatcacttctaatgattgtgcttgcttctctgctacccacttatgccatcaaccagaacaaaaagttctttcttactccagaacttcctcccttctaaccgtctcaatcagttacttgggacacacaacttgaatctccaagaccatcactctctctgctttctccccacctcttggatccccactgccttcatctgctcctcgcttgcttagactctatagatcaccactgcagccactctcctgcaggtctctcctgctttactttccttcggtttaggccccagcaaaaccccagccatgaattaatccatccacccctttctcagcactgatacctggcctgtttggtgctgctgaagaacatcagaccacgtgtgtgtgtctggaatcagaaccatcagaactcacgctcctccttcactctcagcattgcctcacctccagcccaaagccatggtgggagcagcagacactctctcttcaacccatctgtcaacctcaagatggctccctgtacccttgcccttaaggactacttgctggggctttggtggcacagttttgctcctgtcatcctctttatttacccctttttggttgctggttcctgccttgctcttccttcttgaagaaagagggagcccaaatttgccccattccctcatgtccagccccttcctttgctcactggcttctaccccattctcccagtgagccactgtagcccaatgattgagccccttatggctgaactcaatccaaggagcatcctccagcattaagctctcagggattctctgcaacactggagtgtgaaccacttcctccttggtttccacagtgacacgtcccttgcaggtgctccctacatttcccagcatgcttcttctccgtttcctttgcaggcaccttttctctgctggtagtttagatgttaggttttctctggccctgtccttgctcttcctctctcctctccctggctcactttgccaacctggagtctcccatggtctggtgaagcctggaggtgggtgacccttcccagcatgtgctacctgccgtactctctgtgtggcagccgggctgggagcagctggtggctccaccaggagcaccatgaagacattggcctctgggggtctgggaagttgaccctttgcacagcagttctggggaggtccctgtgactgtgcagccagtgaagcagcatcataggcattgcccgagggcttgttgatctaactgagagattggtagatctaaccgagagcttggtaggtcttggcttgctggctgagagtttgttagatctgcagggtctcggcaccccaagctcctaaaccaaatgcacgtgttgacaagcccccaggagtagtgcccatacagcagcatgtgaggggctgctgggaaccagtgtcagcctgctgagatggggcagagccgagagagagtcagggaactcagtttcttaagatgcttttgcttcaaaatagaggccaggtttccaatggaaatttcatggaaggagccctgtatttttttctaatggaatggaagcttatacttggtaagcaaaagattcttatttgaaaataactcttgttccaactttgtgggctcccaagggaatcgaattagagtagaggggagagaagcagtagcatccaagcagcctggctgtgcctgacgcgggtggatctcggggctgaactgttcccaccctcagtctggggccgggcctgggcccaacaccactctgggagaaggagatgaggattttctctgaggggctgtgtgcacaccctcaggttcctccttcctagagcagccaagggtagtgccgtccagggtacggcataggcccagcgaggcctgtccttccagccctgcctccctctgcccctcaggccgaagctcgaaccctttgctcactgaactgggcctgcagaactggagtacatgggcctgcgacagctgcatatgatcaaaatcacccctggttttgagctggctcctgaggccaaaaacaacaactcctcctgctgcacatgaccagggtggtttgggtttagttggtaactcgcccgtcaccatctctgcctccataatgagcacccctgggctgggcagaaaaggcctgggctgtttcaagaaatgagaggccctctgtggggccagtgtgttctggttccacattccaaatagagatgatggggatagagaggaagtgaacttgggatggcaccaggctcttatggtttcagacagaagagaaacgacagaacaagaaagctcctggcagcatctggaaagggccagggtctgggcttcagtcctgcagccatagtccagggtgttgccatgactggccatcatctcctgacccttcctgtgcagatccctggccatgggcaccctcctccactgctgggtgcctctcatccactgttaagccctatccctgaccttccaggacaggtgtgtcccacatctccataggaccctggtgcaccagcccctgggtactaggcactatcattgtaaccgcatcttgcctttcctgtaagacccagatggcaggcacagagactcactgcctaggatcccggtaagaaagtacttgctgctgcccagatgcggggtgtggttagctgagggctaacctctgggtgcttcctagccaacgccactcctcctggggccacccccaggcactgactgagcagagtggtggtacaagggcatagctgttcctgtccagcagcgcctctcctaatggcaaatccctgctgcagagctctctggtcctggcagagaccttgtctcagctgcatcccagcctggacactccctgccccgtcccactccctgcctttccttcctgtgtggtactcccaagacaccatttgcactcttaaatctgtctcaccctctgctgcccagagaacccagctggggcagcctggcagcactggggccaatgcagcttcagcacctggcatgcagctgtcaccaagcccaccggccaggtcagtcttcagagtaggaaggtgatgactaggccagaacacagagagctgcatcctcaatggggaccatattcctgccttctggggagggagtgaggaagctgggtgatctagagcctcctttaccacctagtctgcctgaggcatgctctggctgacaccacggttgcaggattcccagggatgcctgctcaatgttatatccctgaaagtgcatctgaggtagaaaagcatgggatagtgtgtgcatgggtgtgtgcatgtgcatggagaggcagctgtgggcagtgggtagtgggagacctttgacatccccttgtgggcctcctaggcttggggactggacttgggaagggagtcagggtggatgagttctgggcctcagcccagctcccttcccaaacacaggcaggatgtgagactttgggaagaacctaggaggctctgtcccagggtcaactccatataggtccgagtccctgaagggtgtggtgtaagtggggccaggaggaagtcttgaccccagggcctctccctgcctgtcttccaaagcctgaaatgccaccatttgggaggcctgcctttgcaactgcacagcttcagttttttggggggcaaaatcctaggtggtgaagctttaagacaaattcagccttgcagaagctgcctcagccttcgactcccagctcatgtgccctcacttgtgccttggctgcaccttgaggcacctacagcagcagcatggcctatactacaggtcttctcaaagctatgagggactgagcccagttatcccctcgcctggcactgcctggcacagagcatgtgctcatcaatgaagatggggtgaaagtcaggccgatggcaagggagacagcattgtcactcgtgactcagggttgggtgctggtttgcctggtgcgggaggagctgttctgaacactccatgctaatccctttgcttcatccacacagcttcatcctcatgagggtggactattgtgatctccatttatgaggaggactaagacacagagcagttaaggaatgtgcttgggtgtcacacagcctggcaatgggaggaagaccctgcataatgggtcaggctgtggtggggtgggtgtgggggtcctggggctgaggctcaagcttcagggccatccccaagaatcatttatgtcccatcaggcttacattgtcctgggggattcttgaaaatgtccagggagcctggtgggaatgggaagagacactgtggtctgggcatttgtttccaatgacatctgcactgttcaggctgcagccaggcctccctcctgccaaagcaccagctctgcagtgctgctggctggctgtgcctcagcaggtctgcactgtgctcagaagcttcatcagtgtgtttttccctaagaggctggggctggtgggcaccctgggacacgactgtgagtggaggaggccagtgctctggggcagaagcagcccaggcacactgcagggctggcgcatcctgtgctccagctgctgagcctccccccaccgcaccctccccctgccaccccaccagagggcacagggacaggcacctgccaggtgagcttgtgcccagaacacctggggtgttttcacacccccgtctcactgaatcccacggcacctctgtgttctccactttccagaagaaaataggctcagcagtcagggagttctaaggccacccagaggtgagtgggtcgggtggccagggtttggactcaacattcaaagagatggagaaacatgtctatcctgggtctgagtctaagcggtgagtcatttgggccaggcattaatccagaccattctcatttggatgagaacatgagtggcaggtgaggctcgcccgaagagccagcaccccacatgtaggaggggcaggcccagccccccagcttcaggcaggtcagccggctcctgcatgacacatctgcattgttctggacacttcgccacctcatcttcatgcatggggtggggtcaggagggagccccgcctttctgcctggaccggaagcccctggtgttccccacgtggtggtcctacagacctgcccttatcctgaagcacaaggcaggctggactcctgctgacctgtttcggttttctcctctgttaatctggaatgctaacgcatttttcacagagcggtggggaggacatgaaggcatgttggaggcattacagagctgcagtgcagaatcataagctattgctataagaggccgaggaagaaaactggactggaattcaagtgtcgaaggcaagggttagtttgtggggcagggatttccaaatttctgatcaggggtctctgggtgaggctccaggctgagtgagcccctctgctcttgtctgttcctgcctgtggccaatgccagagcaactttctgagggtcctgagaggcgtggtcctccttcaggtgtcacactggtgagatgccatctgggtttttattgagcctgatcagaagccataaatcagccatgaagcagatgctgggcctcatcccagaagtgtccaccacatacgagagcctcctgggtggccaggcattgccctgtctggagcacactggggcttggctggccaaggccagcaggctcccaggctccctggagactctagggaggaggatggctgtgctaggaagaagggccactttttcactttgcttcattaccagtgatgagaggctgcaactggcttgcacaatatggtgcaacccactccccgggggcccgtaagtcaacagaggcctaagtgtcttgcctgcccttggctgtggctttccttgaggcagaaggctggctgtgacacgctaggaggccccttctgattttacatttcttctctggggcccaatagggcctcctttctctgagctgctggagcagagtgtctaggaaacacacgttttcaactcctgcacagagtccctggctttggcctgagctaagtttgccactctccctattcccttccactttttgccctgatcagagaatcaacccaacctgccaccttgttgggctccgtgggactgaagagggagaggcagggcaggccccacttgcttgctgtggaaccggaaacccaggccaccctcaggtgggagaagcagcacaggcttagcagaacatggcccacagggagaagtgggactcagcaatccagatcatgggcttgaaaggaggcagggcctgggttcaaattcagatgcagacttcccagctgcactactggccccctgcgtctcccggggctgtatatgagcaccctgcagagcagttacaggtaagccctttagtgcaatgtctgagccccatatgcaaggggctggggaagtcatgggggttattactggtgccatgccacacagtgtatgtggctcatctcagccccttgatggtgcgggaggtaatattatacccattttacaggtggggaaagctaaggtagagaagatgatagaccattttgatttgccccaaatctcactggaatcctgatgtttttagccccaaaggctggactgctatttactaactttcacattatctcctggggttgaggtttgatgctcccagtaccctggatgctggtagaactgggtttctccagtgcaggacttagaacaacaagcttgtttgggcacaagcaacacccaccataattgagcatttcagagatgagaaagtatggctttcttctactccccaccatcttctaacaaagacatgtccattatgatgccacaaaaataacaaaccagaccaaggaaaacagaaagtaaaagtggagaagcaaggctaggtaaataagacacatatccatccactgcaaagaccaacatagatgctataattgagccccggagttcaccctgaacttctggcagcaaaagagagcctcaataggttataacattctcacagacacaaagaagccccccactggttgtggttgttcagggacactcaagatttccatggcagggctttgcatgtgtggcggggcttccagaccttctcaactgcaaatggtaatggccctccctcagctgcccctgaggcatttcctccatggaagccgagatctcaactccttaggtttctgcatttctggaaagggacaggcttactctcctttcatggaacacaggtggttaactccaccaaaagtcagtcgctcaatgggggaatttatctaatggggagatgcctgtcagaacagccactggacttctagacaatgactgtgtacttcccaaaggttcccattttccaaagacattctggcttcatggacacccggggctgtggccacacagagggtgggtgtgggttctggtgctgcacttggctgcaagtggcagaaaggtgggcttggagcatgtggggccagcagctgagatggcgatgcagttagagtcccacgcccatgatccctcactgctccctggcaccttccaaaggaatccagacattttctcagagacacagctagtgccagaagctgattccttttgatgatcctggggcgatgccatgggaagtttcctctgaaatgcaagtctgtctattccaggctccagagggacctctaaatccaaaggccctgctctcttcccctccccagggtacgtgaagggctgtctcagcttcttgcttgaagaatactccaactttcactctcagaagagaagtgtgagtcaagagggagggaaataattcctgagcacctaccttgtacctggtgcctccagtgggagagtcagcttctcagtttgtcaacaatggaggagttttctgggacactcaaactggaatagctggtcacccagcttcattaaccccacggcattctcatgaggtgggagctgtcactgctcattacagatgcaaaagctggggctttaggaagccatttgctccatttggggtccccagggtcacggtccttccactcccgcatcttgtcactcctgagggtatgagaagacattgaaaacctagcaagctgagttccctgaaaccttctggctttccttggcttgttctttgcttgctggtggggaggtcttccttcccccgactccatgtctctatggaaaaggaatcccccattaacctctgaagcctctgtgtgccccagatctctctggaatactgtggctgaggaatcctgagccccatgtggctcagagccaaattacaggctgtgctcagatttctgtcccatgtcgggatcacttgccctgcagagaacactcttggccatgtggggttggaggaggagatctgtctacctggcaggtctgtatagctgcacatctaatgctgcattcttcaatcagctttgccagaatgaaggtgacatcttgccacccataagtagggctactgcttgtccctcctaatggatgcctaaaaggaatgttatgttttgaaaccccaaaagccccaatatgtaagttttcctatgtgtcagagacttctagcaagaccttttaccccaggaaaagccgtaaagtgctttgctagaagtaaagcactttgtggcttttcctgggggacccatggagcaccacaattttgtttctcagaagaaaggagcctcgtgtgcagaggctagttagaatcttgtgagaagtcaggctctgagctttcccagctgagggtccagcattaaggccaaacctttctgtggctttctcgagggcgtatgggacaatgcaggggcttccaaatcattctcctgagaaatgttatgcaggggctgcaggagacctctgtttctttctttttttttttttgttattattatactttaagttttagggtacatgtgcacaatgtgcaggttagttgcatatgtatacgtgtgccatgctggtgtgctgcatgcattaactcgtcatttagcattaggtatatctcctaatgctatccctcccccctccccccaccccacaacagtccccagagtgtgatgttccccttcctgtgtccatgtgttctcattgttcaattcccacctatgagtgagaataaatcctgcctctctggtctctggctggagccagaaagaattctaccctccttctccttccctcctgcttgccctaggggatcctgaatcaaaggggacctcacacctggcttgttcttatcttgattggtgccctaagctttcccccttggtattttcagagtgagggctcaggttaatctgaaagtcctactggagaccacccacctcccttaagcaagcagcttacctttcagcctagcgcctcctgtgcctgggatgtttgacaggcatgctcacactgaaagtggctgataagccctgggagctgtggctctttcacagatgttggagccagaaagctcactggcagagtccttcctctgaatggcatcattttgtccattggcctgggacagggcagtgaaggtcaaaggtgagacaatgtggcagaggggacaagcactgtggtcccctggctagaagatggacatgggaggctagaaagctcgtgacctcccgacaaagcttcacaggatctcacccacattgcccaaatatatggctctggggcaaggatttagggggtgaagatcagaaagaactcagagtttggtttgcaaatcttcaggcgcttctcctggtgtcctctaaagaggaagtcaccacctcaggctaagaatggcatgtgcagagccccacctgaagtcactttcctgtgtttgtcgctctgttgtctcatcttcgtccctgtagggaacctgtaggaaaagccttaaattgagagtgaccctgggcttattaacagcagaaagtagggaatgatgataccaagggacaggatgagagagaaggccacactaggaagaagatgaagctgttcaaagtgtagggtctcaggcaggagaaccagggggttcaggtgcctgcaggtctgtgaagagctgtttcagttaaacattctactccaaaacttagtggcttgaagaaacaacttatgattatttctcctggttatgttttgtattgactgggctcagctgggtggtttgtgttaagagtcctcatgcagttgcagtcatagggtgcctgggctacagtatgtgagggctctgctaggcaagacacagatggctgctgatgctggcctttggctggatactcaactggcatgtcaacacctatctgtggtctctcagtgtggcttgggcttcccacaacgtggaagcaagaggcccagagaacatcccaagggtgagctggcaagaggcccaggtggaagctataaggcttctttcaactcagcctcagatgtcctagaatgttacttccatcgcactgtattagccaggaagttaatgaggtcagcccatttttaagggggcaaagattagatgccacctcttgacgtgaggagttagttgtgcatgcacaggagaggcaaggacaagagggcagcacctggcatctgtctcttgctggacttgccaggtagagtgtggaaggcagggttgagggttttcttcaggctctatctggtattgctgttggcagcagtgataatggtgaggctatttcccaaatgcacttcgcaaaacatttttcacatctacatgatttgccagcgagtaagcaagaggttagtgagaagcagaatattctttacctgcctgtgttaaaggtgaagagacaggcttgaagcagtcaagtgactttgctcacacgacacgagttttctgccatttgccccagctcaagcccacccatcctcgcaggtgacaccctccatgtattaatgtgccctgtcccaggctttgccagcatccccaagccctcttcatgcctctgggcaacagatctcctcctgggttctgacctggctctcttgctgtttgctgaatgcccagttaaatggcttcacttccatgtgactccgtttttccatccttagtgtggaattggagccaggactggggagcaaggaaaggagttggagaaagcaaaaccttcctgggtggtgcagagtgggctctgggaatggcctgggggcagacaagaaggccaattccagctggccccatggcctccttgctggctgtcactgggcagctccttttcaggccactggtccaaggggagcacaggtcaagggtgagctgctggtcagatccctagcccagggcaagcccggaggctgcagttatgtgtggaaccacaactgccccaatcttcagctgttgaaacatgaaaagtaatcctgttttgcctaaatgtactcaaatcattcaggagtgtgtgtgtgtgtgtgtgtgtgtgtgtgtgtgtgtgatatttaatgagtgagtggatattttaaaacaggtttcattaataaactgtacttaccatttcctgcccaagcccctaccctacctcctccaactctgaaccatctgggggtggtcttggctagtattacactcaacacaggtgacaaccatcggtaacactggctggagtcccttgaatgtgccagccagtctggaaactgtgggcccaaacaccagcaatgtccatggctgacccctgtctcactgtcacatcctggtactgttatggagccctggccctcaaactcagggagcacactggtcacttccgtgaaaagccacacggtgcccctgatggggttaaagtgcttcatccacggagtgagcttgtgtgtcttacaaaagggctgggcatgggggtaagaatggaatttcaccccaaggatcaagctctgtttcgaccctgatataagaggaggaggaggaggaggagaaaactgacaccatacagaagaattaaacccctgacacatgatttccctcccctggatggcagcccaggaagtgctgccccctgttgccagcctagacactatttgcagcttctgccctgggccaccagtcataaaatataaagtacacagagccctaagtcaacaccagggagagtcaccgcacaaggtgggctccagtatggcctgggggtttgctggcatggattccttgagcccctgccctttctagatctttcccaggttccctcggggaagcctcaccatgcctgggatgggcagcagcaggacatttcagaggtccggggtggagaaagggagactcagccaggaaacacatggcagggccctggtcattgcccatatcactgggtactgccagggaaactagcagtcagcagcaggcaaccccaggaggctccagggctccgtgcctggaagagctgtttggaacctctctgacttccgtgggcaagagtaaagtggggagaggttggtatccttggtatccacatctggcagaactactaaagccagtgagggccgggggcagaggtgacactctcctcttgctccaatccagagaagtggtccctgtgtctgcagagagggtggcctcatatggcttcttgagttaatgtttcatgtatttctgtgtgataaactaccccaaaacttagacactcaaaataatttatcatgctctttcacaatcctgagggtttacgggactcagcaatcagatgtcacctaggactagagtcattcgaaatctcgcctaggctggacactcaagacagcattttctctctcatgccaagtgcccagactgagatggctggccaacttggctggctgggaatctttctctacagatgacctctttgtgtgggtagcctgagcttcctcacatcatggtggcttcagaagagttgtacttcttatctgatgtcatgcttattgtggattaaatgaggatgtgaatattgggaaacatggttcattagggagccatctttagagaccagcttccacaggtagaaagagaggggctaatattggggtgatctggagacctttacttctccttgttaaactcactgtggagccaaaatggccaatggggctcatctggttcactacttcagactgttaagcatggcctcccagtgccctgagggttctggggtcatgtccaggcagaccccctggtccctgcagcggtttgcttgccatcaatatatcctgaaatgctcctcagacaacttggtcccttgtttccatgtgtcctgctatcctattgtcaaagcaactacccaatcctgggaagtcttattattaattgtctttttttattatagccatcctagttcttggttctttatttcctgtatccatttcttttctattgttttcactgtctctagcctctctttgctccaacccctggggcacaggattgccaaggtaattatcatcagatgtagatcttaacctaatattctcctatagaggaacttggagtagacatgaaaattctccgatgagaagttcagggaaaagaaaatacatcaggtccatatgaagtcacagtcatttctctttgtttgatccttaagtgcatagattgcttctttgagttttttggtgtcatatatatacaattcacacattcatgaaattcattcttttagtgtgcaattcagtggttcatagtatgtttacaatgttctacaagtatcattcctatataattccagaatatttttatcacctcagaatgaaaccccatacccattagcattcactctccattgccccctccccactccactgacaatctaatctatttttgtctctatggaattgcttattctggacattttctataagtggaattctgcaatatgaggccttttgtgcctggatgtcttcacttggtgtactattttcaaggttcatccatgttgtaatatgtatcagtacctcattatttttatagctgaatattttattgtatggatataccacgtttttaatccattcatctattgatgcatacttggtttgtttccactttttggctgttctgaataatgctattatgtctatccatattcaaatttttgtgtgcacatatgttgtcatttctcttgactgtatgcctaggaatagcattgctgagtcatggggtaattctatgtttaatattttgagggactgctggactgttttccaaaaagcctgcaccatttcatattcccacaacagtgtatgagggttccattttctcatgtgctcaccaacactttctattatctgtctttttaattatagccctcttggtggatgtgagcagtatcatattatgggctttattgcataaaaaaggctaatgaaaagatacaagtatcaggtggtccaagtgtaaacaaccttgagattatgaaggcagagttgcaatctaaatgcctaacgggaagagttcccgacccttctgcatcataaagtaaaaagagtctagatgggacagaaccctctgtgagggctcagaatcaggcctagcagactcctttctaattcttataacatgggcttccttcaagaaagctggagtcccatcccttttagtagagccgactgaccgctgctgtcatcaccatgaacaggacctggtccaccaagaacttgacatgatgcagatgtgggacctcactcacacacatgaacccagcaggccaaggcaggacattgtgtgaagaggaccagcagcatgagagcattgaccttgaggaaagtgctcaggcccctctcaggctcagctgacccatttcaaaggcgaacaggtgggattgctattctactctactgcttttgaaagaagaaaatcaacagcccctgcctctatttgttgcctagggcaaacataacaaagtaccacagactgacggctaaccgacagaaacggatgctctcgcagttcaggaagacagaagtccaaaatcaaggcatcagcagggccatgctttctctcctcatttcttgtggttcccagtgatccttggccttccttggtgtgcagctgtgtaactccagtctctgtctccatcaccacaaggctgtcttccctctgtgtgtctgtgtcttcacgtggctttctcctctgtgtgtgggtctgtgtatgcttctcctcttataagaacattcaacatattggattaggggcccacttcacttcagcatgacctcattttaatttataacttaactatatatgcaaaggctttatttccaaaaaggtcacattcacaggtaccaggggtcaggacctcaacatatctttcagggggacacaattcaatccacagaactgcccatggctcgatcttttttgccatattctatacactgcttctcggtccatcaggaatgtctttcttcttttctattcccccaccctccaccacacttccccttaggcctctaccattccttccagcttctattatcctagtgcctctctctatgccctgatgacaaaagctgtagagttagccactgcattgtacctggcagtaagttgtacctttctccacctgaagttaagaaacttggatagtctctcctactaactttagcttcagaaagcatgaagtccttccctgtgcttgccctggattcttccgcagatggagggatgcagagttgcctgcagaaaggtgtgtgcctggttctgtagtctgtataaagcagcatgctgtgcaaatcagcagcatttagaaagctctcagcatctcctgagaacttgtcaataacacagattttcagcccctagatcagacctactgaatcagaaactctaggtggaccctggcattctatgttctgacaagtcctccaagtgattctgattcatgctgaagactgagagccactggcatagacaagtgctttagatctcttggagaggctgataagtcagaaggcagtaaataaattgccaaatgtttagcctgcaagtgatgaagtgagaccaaaatgtgtgtctggctgacctgacaaaagctgtccatggggctgctagctcctgggcaagggacaaagcaagtctttaacaactgaggggaattggtggcctggctccatcatgctgccccagtgaaactctgcagagtgaaaaaataaaataaaaggagtagaaaagtaaaaatcacatatgaggaaactagaaaacaggtacatttgagccacaattggtgaggaagcatgcatggccttccaaaggcaagctgcacaaactgaggggtctaaggccagactccccctttagaatgacactgggggacacgggagggttctttatgcagcacagcatgtagagggtagggaagcagggcaaaatgatagaacatggggaagcatgtggacatgcatctttgcaaaaatgtggataccagcatgggggccaaaacagggaaggcaaaccagcagacttaccattctgatcgtggtaactagaaggaaaggaaacatgaactcctaaagatgtgcatagagatatagaaataaaccaattttctgcatacatccatgtattaggggcttcactctaagcttggaagatctcatgacttggcaacatcagattttcagggaagaatgtagatggaaatacattcacagacaacagggcagaaccaagctgcctacttatctgctattctttaacacttagcaagggttaaagactcccttccaagataagtagtgatcaacaagaagccagcatgatatctatggaaggtattgaggaacatgaaaaggaaaagagtaaagacaaagggcagatgagaaacacatacctggagcatgatgacatccaacacatgaaattagaccccaaagccaagaaatcaataaaattagaggaaatgtcatcactctgaaatgagagctcaaagaagaggtatgagaacttgaagaagagatgataagataactaagaagatttaaaaaatgaatctgtagcaataacattaaaaactgtatagaaagaacagctacatgacagtcatcaaaaaagagaccagatactgttgagtaaataggcagtgagaaaaaggacagaattgagaaaatgaagcacaatgaagtggaaaaaagtaaagagctaatacagataagaagaaagtgtatacatatgtaacaaatcttcacgttgtgcacatgtaccctaaaacttaaagtataataataataaaataaaataaataaataaaaaaagaagaaagtgagatttgaaagacagacaaatgctgtctcaagtacaaatagttgatttttctgaagacaatagcagaaaacacagaattgaaaaataaagatatagtagaagaaactatcctcgtgtaaagaaagatctaaatttacccaaaatttcatgacccagaaaaatggtcatagcacaacaaaatatgagtgatattctgatggagatactttaattaaaatgtaaaaaagtcccaactcattggccatctaggtttaaaaacaatcaactgaattgcaaaagaagaaagtttctgatagtggcttgcagttttcacaacagaatcattcaaagttagaagacaatgtggtaatcttaatcttcagagaagaaaacattatttaagtttaagcaagtaaagctgtcattttaagagtaaatggtaggctgggtatggtggctcatgcctgtaatcccagcactttgggaggccaaggcaggtggaacatttgagcttaggagttcaagaccagcctgggcaaaccccagtctttgtggtaaaaccccatctctacccaaaatacaaaaacttagcacggcatggtgtcatgcatctgtggtcccagatacttgggaggctgaggagggagaattgcttgaacccaggagcaaaggttgcagtgagctgagatctcactactgcactccaggctgcgcaagagtgagactccattccaaaataaaaaaaaaaagattaaataataataatggtaataatcaattttactgaaagccagaccctttttaagtgcctggcatgtgcaagcgtgtgccagagagaaaggggatgaaatactgttttctgctgtcatcctactacctcaatcagagtgactctacaacattccacaggcatgttctcctgataggaggcatgtgtgtttgtgtgtgtaggggtggtggctggggctggttgttaaaaatcacttgaccagctgcgacaaaaataaggaccacagtaatgagtcatggctcccatttagcaactaaaacagaattaaccttttctttaaacaaaacaaactctttttattataaaataatactcatatagacaatttagaaaatatagaaaataaagaggaaaataatagttgctagtagtataactttaacaaagaataatttcttttttttcagtgcagcctcttttatttttacatagttgttcccaaataaatatagtttttatgttgcatgtcacatttaatatttttgtatcattggcattttttatgtcttcatacattttatattcatagcctaataatatcccttatatggaatacatgtacacctagctgggggcataaaggttatttctatgtgctggcaggagaagggtttggcttctgctgacaactcttataaatagcagtgcagggcataaagcctttggaaggtggattgcttcttggaataaattctcatgagtgaaaataattagttgcaagatacatctgggcctgacacagaatgccaaattattttttggaaggttcatgatggttcacactttcaccctcaagacagggagaaccagttcattacaccccgctcatcccttgagtattcttccagaggagaaaaatgactctgcaagaggcttttaattttttgtttcattgattgctagtgaggctaaaccttcattgcgtgttctgcaactgagtaaatgatctgcttctactgtggcctgtgcatccacttcctggctccgagccctgttttacttcctcccagtcttcagctctccagccagatgccacccatcccagccccagtctgggtcagtgctctgagcacacccatccccacccagctgggagactcctgcattgagatctgtcctccactacagcacgacctcctgagagcagggagacacacagggtagacacatcgtctgtgctcagtgctgaaccaatctgtgtcttcctcccagtgctatctgatgagactgcctttgaactgttatttccatcttgaggtcttgacttctaggctctgatcctagaactgtggctgccaccagctacagaagtcaccccaaatgtcttccatttcttaataaagtcatctttctgggcctcaggaatctcaaatcccttctgtagagcctcccagcacagggctgctaagagttaattaatccacttgggaagccagtctgccctggcagggttcagtccatggagacgatcacatttatcgtttagttaaaggcttcatttagcccctgccctgaggtgcgcacagagacattttcttgggcaaacttaattattgcatcagaagaaaaaacatgttctcatgttagttttggggagggagcaagcgccagcaagacttcctgtaattttcattaccagtaatgacattttccacaatcctgaattcattgggttattttaattctttttatattctttgtctaaatggtgaaggaatctatcaaggggaggcatgatatcacttttcataaactcaagaagttgtagggtattttgaaaatcacctaatccatgcctccaccttcatacagcagaaccatagctaaatcctctgacagctagaaacctcctgaatcagtcaagatttctagagaaatgacttccacagtctccctgaacaagctgttctgtggtttggaaactcagaatcaggaaggtctccccaggtctgataattgtcctttgcaatagcagtgacagtgtaaggctcccttttatgggccgcagcgttctcaacctgggtgcacgtggaaatcactgggaaaatttgaaggtcctgatgtccaggtcacacccagaccaattagatcacctgccttggggagggagcagaaacctgtcttttcaatgtccctaccctgggggatgctgatgtggagccagagtggagaccctggctccatttctgcttatttgtcaaatgtctcacctgcaagggacattaatgtccacctggttcatggttcccagccctgcctgaacagcagaatcacctgggaaggttaaacaacctattggtgcagggaccccacccccactggtcctgactgaattgatctagggcctggctactttttgagagctccccagggctctctgtccaagtgaggaaggtggccaggtctgctaccttgtgtgagaggagctaaggcagactccaagagaccttcccacatgcaaatgcattcattttgcaagggcattaagagtccctgagttctgctgtcaggccaacggcgcctctaggacccagcggccactccatgtgggttactcagaaagatgatttcttatcatttggtgcctgagaaggtcctaacccctgcaacctgtgaatatgaatttctaggcaaaaacaatgtattccagatgtgattaggttaaggagtttgataagggggattatcctgtagtaaccaggtatgccctaaatgcatcacaaatgtctttataagagaggcagagggaggctgaaaacagacagaaaagaagtgatgtgaccatggagatggagaatggagtgatgcggccacaagccgaggaatgctggcagccaccagaagctcagccaggcaaggaccttgggaccctggaaggagcattccccagcttgttaactgtagagggtatcgactgcaagttgtctaggttcttggtgttttgaacaaagaattgaacaaaacacacagcaaagcaaggaaagactgaagcagcaaaagtagaaatttattgaaaatgaaagtacatgccacagggtgggagtgggccagagcagcagctcaagggcctcggttacagtatcttccggggtccaaatatcccctagaggtttcccattggccacttggtgttcaccccatgtaaatgaagtggtggccggcaatcagtctaattgttttggaaagcaaccagaggctgaagttacaaacttactctatgcaaacatctgattgtctgctgcaaccaatcagaggtactttcaattatctatctgcctcaaataatgacagctttgattattgctttccaatctctcttttatttcttttttcttcttattgcactgcctaagccctttaatgcattacagcattgaaaagataaaagaaggcattcttgccacttttctgatattaaagggaatatcttaaacacttttacatgtgatttgccataggttttgtttctttattaagtcatgagtggatgttgaattttatcaaacagatctttgcatctataaacctgagcatggactttctcccttcgatctgttgatatgacacattacattaattgattttcaaaattaaacatctcactgacattctggtggcttcctgaccttgctgccttttatggctcttcgggcttctaccctttttttctgttcccatgggagtatctttggaagagagtggccctgctcacaccagaactagacattacatttttcatgactccaacagtgcacttgcaattgggcttatgtggatggacagggctagattccttccatcatgctgccttgctcgactgtccgatcttgggacatttgacagcaagcctctcgggtcaccctcaaatcatctttctcccagactttctgacagttcaccttattgtctttggccttgagacctctctcttcatcattctcctgcatccctgattctctaggacctcagtcctggggaccaggctttcgcctggccaaagagcacatcctcccctctgctcccctccctgcagtgctggcccttctggctgtgctgtgagactggccacaatgtctaatgggagcccccatttctgggcctcctgctgctcagcttggtctttcagagagcacccctcaaaacccagagcaccagatggcagccacccccaggtctccacgtcacctatgagaagcgttcaggcccagcacacggcctggccccggagtggtgcttaagaaatgtttgttggttcttgctctttcttatagctgagcctgggtctagggatgccctccctggccaggcatggctaagaggtggggtgaggggcttcatgggttcgcctgtgtcccctgcagcacccctcactgcaggctcaagcttaccaggacccccactactgactaaacacacatgttggatcctactattaaaagcagtgagaatttaatccttcagagttcagctcaagcatccttttctcagaagactccctaacctcctagactaggtcactgggtcagtcagagtccctgcgggaaacagatggtatatttaaattgggtaatttgatcagagttcaatgaggggactgtctacaaagtgtgactggtttaggtgaagcccctggggtggggtggtcctctaagccagtggagctaccttaagtgggacctgatggagtgggggcaggagtgattctcagaaccttgtgcagcatgggggctgggcgggaactgggcctgctgcagagaatgcagcgggcagggagtcagaaaaccagtgcccacattcctccctggctgcctccagcctctggtctccagctggccctcctatcaggtgaatgcagctggaaggcacgggccagcctgtagggaggctctgcacactgcacatgtgtgcgattgtgtgattgtgtgtctgccccatgagagtgtgagctccacgaggaaggaaatgtgcacatctcactcacagcacagcatctggcacattaccagggctcactaaaagtccgctgactggtgcagaggtgtaatcaatggactgtcctggaagacattactgaggaacccaagagggactcatcacccctcattcccttgaatacagtgcccttactgttttctcttgtctcttcatggaacttgggaggtcctagatgaaaggtctcaagggcaactcccacctcatcttcaactccatggctagagcatgctctccccagcatggctaggggccttcagcgtggcttgacatcctccgaacacgtgactgctctcctgagatgtgtgggtgtctcctctgctctcatgctccaacttccccatgtgccttgctatggactgaatgtctgtgttcccccaaatccatatgttgaagccccaagccccagggtgatattatgggaggtggtgcctttagaaggtaattacggttagatggggtcatgaaggtggtgcctccatgatgggattagtccttacgaggggatgaagagaccagagctttctttcccacatgtgaggacacagtgagaagtcggctacctgtgagccaggaagagagtcctcaccagggacccaccatgctggctggcaccttaatccccaacacccaacctccagaactgtgagaaatacatgtcttgttttagcctgtagccccttggtgtatggtattttgcagtgaagacatctcctggaagcttctttcagaccccccagcttccctgtctctggcccttgacaccactcttgaacttccctcctgtcctacatgtggtatctaaggaggagtcactgtcccttccgaatgctgaaaggccctgaatggtcgggagtggctctggcttccaaaaagtgaaagttagtcctagaatgacaggtgtgggctagagggaacagcccctccaccttcaggacaagtgggggcgctggccttccaaagattctcttcaggtgcagaggacaggctcatgtgaagcagctgctggctctttcccttggtctgcacgaggtgcatcctgccctgggctggcctgaaactgagcgctggggatgtggagggaacagccttgaggggttcatgtctggtcaccaaagagacaaaaaacaagctgacaggataggatgggggtgtgcagatggccaggcctcagggaggaaggagtcatgaggaggtctgcagcatgggcgggtaccgggactcagagggaacctgagcaaaggggaggacatgagctgagtctaaggggaccccaggccattttccacatgcagggaagatgtcggcagaagccctgaagagaagctgtgcctgctgagaaccatcagacacaaggtagacccatacagggctcactcaagggcatggtgaccttgaggccccagcttcaggtaggtaagttgcctgcattcttctgtcatccccgactcctctcatttgactaggtgtgagtgatagcatcagtgtctccgaactcaggagatatcacctggccacacatcaaagtcatgtagggagctctgtgaaaagacactggttttagggctcctcctcctgagataaatattgactgggctgggcaggggctgggagatttgacagtttttaaacctcctgcagctatttgagtgtgtagctgggatttagaaccactcgtccaaggaatgtctgcagaggcaggcaagctctttctctgcgtgtcccagcctattagctgccaaagatgattccaaagtccattctttccactttaaaatacaagatgctgtttgatagatctcattttatgtttttcaaagcaatgggtttttttttttttttttttttcagaattgaatgactgtggtgtttggggagaaataaaggctgagtgccagcttttcttcctcctcttggaactggtgcatcagcttgtggaagcatgtggagcttctgtggggtcctggggcatggacaagtgggaatcagtcagctgatagttcagtagggtgtagggagtgaagctttgactgcacccaggagagctgtagaaaaaagtcaccatgagatattaaatgtcatcactttcagattattcattatatatatataggaataattttaaaagccacttgagagatcaactgaagaggtgtggacagagttttatgcacagagatacacatattgaaaaccaccaactttttcagtaaaaagagaaagctgctgtgccagatgacagaatccagcggagaaaaaaatttaatgacagggagatcatggtataatgctaaaccaaagaaacatataagcctacacataaagtagcatctcaatcatgtaaaattcaagaattaggccataatttttaagtattttcaaatactgcagcctttcaattatcagttaatggtattacatatgagttattatttctttcttatttattagtatttttaaagattttctgtaataagagtgcattattttcataatcagaaaaaaattataacaaaaatatcataacaagtcagttaagtggcaagtggccaactggaggaagggtttccacatttagcaaataaaaagatagaatgttcattgcatttgaattttggataaatgacaaataaatgtttagtataagtatatcccaaatattgcctaagctatacttatgttaaaaaagtatttgttacatctctgaaattctaatttaattatgtatttctttaatttatctgataaccctacctggaggggaaggagaacaggcccaggccatgtgggagatttcaagccatcctgagagctccccggctgcccaagacacaggctttggctgggcttccctatgtcaagcgatggaaggcaccatctatgcagcagccatgctctctcctgagtcctcagatcaaatatcttcttatttctggacttaagtacagctgctccagcatatacacctacttcatgcaaatgataacaataatatttatttgtgttgcatgctaacattctcagtgggcatcatattactaatcacatgtgtggatttttatctctgatgggtcacccagcaagtgtcagatcttaacacagctcctctaagacagggtctattcttagtcccattttgtggctgaggaaaccaatgctcagagaggacagaagcttgctggaggccacacatctgcagggtctggtctcagatcccactgccctgcccccactgagcctggtgcaggaaagctcttctctgtgctgtgctctgtcactgtaatcttggaagcagccctgggagatggcagccctgggagatgcctaccataggaaagctaagtcccctctccccctcccccgaccccagcaggatcccattggtttcttctgatctttctccctccctctctgccatgaaggtttttggaatctgctgggtctgctagatcctctcactatctctgaacctcagacaaatcaccagagctgccagtgcatcaatactctcacctaatccagaaacatgaacttggctctcagtgcaaacacccttcccaccaggttgcagcattcccaggtgacttttaagtgggttacagtgaaagtttcttcaaaagcatctctttccctgctatccagggctttaactgctgattgatgatttataatataacaaacagaaaaattttttttatggttgaatttctggcttcagctcttatcaatcttatattgtctagaaaaaaccaagatcgtgacttctgaggaaaatccccacatacatctcattgtacttattccttggtgaaatccttaaactgaagtcttgttgtgaatacattgtttctaatttttcttatttctttgagtcccttcaaggcctctcaccaaaccaaatcctaaagctttcttggaaatccagaaaattaagtgaaacaagaacactgtagaatatattaaatggtctggcacaaattaatgaaaagctctttgcttgtaaaagaaaataaagattcagttcactcaaacaaggaaagctctgtggggaaagcccacattttccacttggcttcagcacctccaagtgcagtgagtggtgagtgagcagctcagtgtgagcatgccactgtctacacgggtggcatgaggaagaagagtggcccagcacaaggcagggtctctcaacaacggtaacagatagagaacaccgtgttcattttctgcatgaggagatggatcctcccatgcacagaggggtccagcaacatgcccagagtctcccagctagtaaatcatgaggctggacccgaccccagaccctgagctttccagcacatggctctgcctccctcatgggccaacgtctccaaagtctaaggaaggatcaatcctttaaagtcagaatgtgctgcagttcagaggtttatgaacctggggttggctctgaaccatctccagggcctgactttgggctgccctggaagctttcttggcaccttcggtcatcattgggctagcccccatcattcctatctccctctgaactgattctcttttccagcttcagcatgagggagaatgccaaggtcatatagaccatggccaacaagtaaactgtgaagatttgtcccctttacggtgtggtgacgtagaacaagttatttgacctccaggactcagtctcctcgtctgcaaagtgagtatactaacgatcacttccaggactgttgcaaagatttatgagacactgaagatgttcagtaaccttgtccatcctccagctctttgcaggttcaaatgtttcggataaaccagaccctgaatgagtaggagaaggaacatgtgaagaaagccaggggcccacaacatccctctctttgcacaaggtaatgcagttctactcctaaaaatcatcctccaataaaactgtatctagggtagaaccttgactaatgatacttggtatctctctgtggtcaatgataggactaagttggacatgagagatgctattctcagaattaagggtcagggaatacaatgtggtgactgcaacctggtgctcagctacccattaagaagctctttaaaaagtaaagtcgtggtgacattcagggatggtagtgtggccagttcaggtgacagacactcaaagctctatgtggaatagtggaggagcctcaaactgttccctggccccgtccagaaggaaatgcccatgccaggcgccttgggcatggtgttcttgcctctcgcctggctccccatccaatctgcaccctctgccaaggattgaagtcatggccacctccacttccaacgcccgctctgtggctgtgccaggagttgggcattagctccctttcacttatttgtacaggatgaattatgccagggtcgtgttaaccatcatttggagattatttttggagacagaaaactctttagcagcaagcgcaggaggttatacaacgactgtgcaagggagactcttggatactcaaaatagaccttccaaggtgaggtcatcatcaaatggcactctggggacagagtttatggactcacctttggaatactgtgtggtgagcgtgccgtcgccccagccaagagcagggcctgctctaatgcagccgggctcgccctcatttatgttgggatggtgctcagtgtggattgatggaaagaggtggagcaggatccagaaacatccactacctcactcatgttatctcatcgcacaagggatccagtgttagggagacccagggcctggccctggacatttcacatgtccagttcttttttaaccctttgctacaatgtgctgtttggtccgtggatcctgtagctggttcccacatgcttgtgtttttctgtcttcatgatgagaactgtagctctagatctttgaagcttgattttgcttgggcacccactgcatgagagcactgcatcataggaaatgttgctaagttccaaatatccccaagagagcttcccttacaaactgcagaataggactttgctcttttcaaccattaatgaggtctaaaatttgaaaggccagccagtgaatagctaatgtttttgactgaattcaccccataagaattatattgtatgtctgtattagtcagctagggctgtcataacaaactgccacagacttggttgctgaaaacaacaaaaaattaattatcccagttctggaaatgagaagtccaagatcaaggtgccagcagagttggttttttcccaaagcctctctgcttggcttgtagatcccatcttctcacttcctcacatggtctttcctctgtgtgtccatgtctgtgtcccagtctcctcttcttataaggacaccagtcatattgattagcatccactccaaggacctcattttaacttcatcacctctttaaagaccttgcctccaaatacggtcccattctgaggttctgggcggcagggcttccactatgaatttggaggggagtacaacccagcccataacaatctcaacactcagtacataaagataactaacaaaggccgggtgtggtggctcatgactgtaatcccggcactttcggagatcgaggcaggtggatcacctgaggtcagaagtttgagaccagcctggtcaacatggtgaaaccctctctaataaacatgtaaaaattagccaggtgtggtggtgcgtgcctgtaatcccagctacttgggaggctgaggcaggacaatcgcctgaacctgggagacagaggttgcagtgagtcaagatcatgccactggactaaagcctgggcaaccgagggagaccctgtctcaaaaacaataataataatgataacaataataataataatgagatgtgagttaaaaaaaaaaaaaaacagaacaaaacagtacttacctgatatggtttggctggtgcccccacccaaatctcaagttgaattgtatatcccagaattcccatgtgttgtgggagggacccggggggaggtaattgaatcatggggctggtctttcctgtgctattcctgtgagagtgaataagtcacgagatctgatggcttcatcaggggtttccgcgtttgcttcctcatcattttttcttgctgctgccgtgtaagaattgcctttcacctcccaccatgattctgaggcttccctggccatgtggaactgtaagtccaattaaacccctttttcttcccagtctcaggtatgtctttgtcagcagaaacaaaacgggctaatacattacctttacgatgtgggagaccatttgatctttgctattctattctatttctttaaaataaccctggttatgacccacaaaaatgatttcacaatccattaatggttacaacccacagtttttccagatcaaggccaaaccctgagaatacttatttccactctaatctaaggagctaagcaaatactaatcagaatcaaagcctttatcttaatgatgggggagctgagaccatggataggcttgagcaggcctggtcagggaatggtggttacaacagtggccccagtctggggaccaggggtttgagtttcttccagaaagaaggatggccagacaggatcaggatggagggggagtgagaactgtgtctgagacacaatgccaggggacaaaaccaggggaccattcaaagagcaagtgcagggcagagaaaagaaggagctgccaaaaaggccagactcagggcaggggcagggacagagggacgagctacagccacgtggctgcaagcaccctaaaggtcagagctcatctatgttggggatggtgttggcacaggctcggtccctgagtgctgtaggctataaaacaagtgttgcccttttaggtccacttcatctcgttagccttttccatagaacacgggggagctctggctgagtccatgtgacaggacatctcacaacagaggggccctgacactttacacttgaaaagtttggggaagccaaggagaggagtctttagctacggaaaatcaccagagaaagccaagctgcagagaaagccatttctaaaattctaaaatagtcatcccagcattatgccaattaccttcctaaaacacaggtgccatacacccaatcccttgattatgtgaacacatactgtttcctgatggagtatatagttattgctttagaacagagtaaaaattctttaacgtggaatttaagccctaaggattttttatatcatcctccaacttaaatccttccagcttcttaatttgtcatttatacccccctgccacttcccactgtatatacatattttaacattatggtaataataccagagatatggtgctctgctttttaaaaatagcataaaataatttcaaacaatatcatacataaaaagaatttaaactgtttttaataataagaattgcaaagtaatataatataaaaagagcccaaaaagagtatatgtacagctgaaacaagaaaaatccaatagacatcataaagccaccacctggcttaagaaacagaccttttcaaatgtactagaaacccataatgtccccttcctcaattatactgcacctactccctgcaagtgactgtcatcctgaataatgtcttcatcatctgttgcttttctgtgtcattttcaacacagtatcaaaccttaaaaaatcatattttgtaaattcaagttgctgatgttcagaaatgcaatgtgactttcgtgttttgaattaaaaaaaaatcaactagtaaatttgtctattagttctaaaaaattatctgtgggttctttggggttttctatatagaaaatcttaacatctacaaataatgacgctttgtttattgctttccaatctctctttatttctgttttcttcttactgcactggttaagccctttaatacattactgagcaggaaagagaaaagcagtcattcttgccattttatgatcttaaagggaatgtcttaaacatctttacatgtgatttgctgtaggttttgttaggtgctctttattaagttaaggaagttcctcccattcttgttttgttacaagttttgttttgttttaagtcatgagtggatgttgaattttgtcaaacagatctctgcatctgtaaacctgagcatggactttgtgccttcgatctgttgatgtgatgtgttacactaattaattttcaaaattaaacaactttgtattcctgggataatctcaaagtgattacgatgtatgattatacattttcctttgtgtgttctttatggcagttttgtttagatgtcttcacctttatttataaagaaacttaatctgtagctttactttcttgcagttactcatctgttcttagtatcagacatgtgatagcctcatacaatgagttaggatgtgctttcgctttttctattctttggaagagtgtgtgtaagataaaactatttgatctttgatgtttgatagaaatcaactgtaaggccacttgggtctggggtttcctttgcgaaagaattttaacaactaatgaggcctcctacatcttcctgaaataattttagtaaggtttttttagatatgtatctttctcatcatctgttgctatgacattgttcataacatctctttattactagttcacagcaatttttttgtcctttccttttgtgccttattttggatggagtgctttaaaatcagattccactattatccctctacgtgttttacaaatataattgtctattctattagcgattatcttagctatttcagtatgcgtgtttaagaatgcctaaagcttatcaatatctatggtcatctcaactgatacacttgatatacttcatttcaaggtttattgctttccacaagcggatgtactgtgaagctaatgaaacatgagtttttcagaatgcttcatttacatgagctctttctaatctgctgagcctaattttgctttttaaaatttggtatttttgttaacaaggcacattttgtgcatttacagtctcacagaacctggattgacccctgatatttgcaaatcattctgtggatttctaacttctgtgccagctcagcattatatttaaaaatatattatttgtggctggaagcggtggctcacacctgtaattccagcactctgggaggctgaggtggtcagatcacctgaggttaggagtttgagaccagcctggccaaaatggccaacctgtctctactaaaaatacaaaaaatacacaggcttggtggcagacgcctgtaatcccagctactcaggagggggaggcatgagaatcatttgaacctgggaggggaaggctgccctgaactgagatagtgccactgcactccagccttggcaaaagagtgagccctcatcaaaaaaaaaaaaaaaaaaaaaaaagaaagaaagaaagagagaaagagaaagaaaagaaaaaagaaaaaagtgataatttgtattgtatctgttgtttcatttgtctcagcagatctaagcgacctcactgctgtggcagggactgagatcatgaaacttgttacttgactgcaaacatggccatttcttatagaaaaattaagatatcaaatagtggatcccaaagcttttgaggacaatgaattatggagtcagttctagggaatagaaccagtttctaatcagggacattctcttatcccagagcagggggttctgctggagcccaggtagatttcagtagttgtaatgtacctccctttcatctccttctgggtggaagtgtctatttagttattcttctatctctgtctcatgattgtattctgaattaggaatgaggggcaaataatttcttttttcagtttttaggtctctgtgcctgacttagatgacaagatcctgaactttaaagagcttgatgttataatgagatgaaacttttgggtctaggggtgagaacactttgccagatgaccgtgctttgggctcaggaaagcccttgaccagagcctggttctgcttcctgggtccacagtctgctctcggaggcacctggagccactcctagtttttgctctgcatcaaaagctagtggggatatttctggaaagagaagtccatcctgggcttttttttttcctgaacattaaatatagacattaagtataagcactaaataaaataaataaaaataaatattaaatataaataaatataataacaatattttccaaggtgttaattcattttaaaacaactgaataaagtatcttttggtggctgctagagttaattaagttacctatttaatttcaaatattcatgcccctcttcatttaaataattattggagggggcttatgaaaattgatatgggttaaaaaagagtcagtggggctaagagagtagaaatagtaagatgaggcatgaaatatgctttctaagatcccacacacaaaaggatcttaaagtgtttctgggactccaagcaacccaccagaaaaggaaaacaggatcctgtgacatgaattacagtgtccttgatataaacaaactgtaacgactgcatactgcactttatgctgctgatacttgagacccacagccctgtcactgtatagggccagggacagcgtcctttaccaatatcctcacagagttagcaacggtgggtttcccagctgcctttgagtttgctttccatgtgtctgcactttaagcaggaagcacactttcatgaaaagagctccatgggaggggctctgagaacgaggtccatgctgctttggattaatccttcgccaaattctcaatgaataattttttctcaactttaaatgtgaggtgatgatgttttcaaggtttgactccctgatacttgcagtgaagctggtgttccttgcctttccatttgaaggatgacagaaaaatgcttagtcagagtgaatcccagattccatgctctgcagagagctggacagctgcttaaccaggacaccagcctgacagcaggtcatgctgcctgtcccacccctgcccagcatccagggctgacctctgtccactgcacaagaggcttctggagggccaagctcattcctgacttgctcactgtttgtattggtctgcaggggctgctgtaacaaagtgctgcaagctgagtggcttagagaacaaaatgcattggcttgaaattctggaggctggaagtctgaaatcacagtgtcatcagggctggttctaggccactctcctttgctggatggccattggcatattcacgtggacttctctcaactgtatggctgtctccaaatttccccttcttataaggacaccactcctcctattagattagggcccattctaattacctcatcacacctctgtaaagtctctatctccaaataaggtcacactctgaggttctgtgtgttaggatatcaacatatgaattttgggtgaacaccaaccttaacaccatcatagctccagttcctaacatagtaaaaaacaacaactgcacagcactaaaaaaaatttggagaattaatgtatgaagacataaattgaaatctattttatcaatagacagaatgtgttcaaggcccaagattttaatgttatagcaataattctgggctggaaaatttaaaatagatgttactaaatgctcatgttagtcataaaaggcttagcaaaattgagcagatgtaagttatgtgacttcctgaggaacactccaagataaacccattataaaaagtacctcttagcaaatgaatgagttgaacttgcacctacacagggtcattacccaaacatataggcacaccttggagatactacaggtttggttccacaccactgcaatagagtgaatatctcaataaggcaagttgtattcatccattttcatactgctatgaaggaatacccaagactgggtaatttataaagaaaaagaagtttaatggactcacagctccacatggctgaggaggcctcacaatcatggtggaaggcaaaggtggaacaaaggcacatcttacatgtcaacaggaaagagaatgtgtccaggggagctatcctttataaaaccatcagatctcatgagacttattcactatcatgagaacagcatgggaaaaccccatcccccaccccatgattcaattacttcccaccgggtccctcacatgaaacgtggggattatgggagctacaattcaagatgacatttgggaagagacacagctgaactatatcacaaatcacacaggttttttgtgtcccagtacatataaaagttataatttacagtatactgtagtctactaagtgtgcactgtctaaaaaacataccttaatttaaaaatactttgctgctaaaaatgttaacaatcatttgagccttcaatgaatcattatctttttgctgatggagggtctttcctcgatgttgatggctgctgactgatcaggttggtggttgctgaaggttgaggtggctgtatcaatttcttaagataacacatcagtgaagtttttagcgtcaattgagccttgtttcagtgaaagatttctctgtagcatgcagtgctgttggatagcatcttgcacacagaacttctttcagatttgaagtccatcctcacaaaccctgatttatcaaataagtttatgtaatattctaaatcctttgttgtcattccaatgatattcacagctacttcactaggagtagactgcatttcaagaaatcggtttctttgctcatccgtaagcaactgctccttcttttgagtttaatcaccaaaaatcagcaattcagccacatattcaggctctgcttctaattgtaggtctcttgctatttccaccacatctgcagttactttccctaccgaaatcttgaatctttcaaagttatccataaggtttgggatcaacttcttccaaattcccattaatgttgatattttgacctcctcccatgcatgatgaattctcttagtggcatctacgatgatgaatcctttcagaaggttttcaatgtatttttcccagacctatcagagtaataatcaactatggaagcaatggcctgacaaaatgtatttcttaagtagtaagacttgaaagttgaaattacttctcgattcttgggctgcagaaaggatgttgttttagcaggcatgaaaataacatttatctctttgtatacctccatcagagctcttgggtgaccaggtacattgccaatgagcagtaatatttggaaagaaaccttttttctgagcagtaggtctcaaaagtggacaacaaatattcagtaaaccatgctgtaaatagatgtgctgtcatctagacttttattattccatacatagaacacaggtagagatttagcataattcttaaggcctttagtatttttggaatgatcaatgagcattgtcttaaatttcatgtcaccagctgcattagtccctaacaagagagtcagcctgacctttgaagctttgaagccaggcattgacttctctctacctatgaaagttttagatgacgtcttcttccaatagaaggctgttttgtgtacattaaaaatctgttgtggccgggcgcagtgactcatgtctgtaatcccagcactctggggggccgaggcgggtggatcatgaggtcaggagttcgagaccagcctgactaacatggtgaaaccccgtctctgctaaaagtacaaaaattagctgggcatggtggctcacacctgtaatcccagctactcaggaggctgaggcaggagaatcccttgaacctgggaggcgggggttgcagtgagctgagatcatgccactgcactccagcctgggtgacagatcgagactccatctcaaaaaaaaaaaaatatctgttgtttagtgtagccaccttcatcaatgatcttagctagatcttctggaaaactggctgcagcttctccatcagcacttgctactttaccttgcactttatgttatgaagatggcttcttttaaacctgaagaaccaacctctgctagcctcaaaacatttattttgcagcttcctcatctctctcagactttgtagaattaaagaaaacctgggcctttctctgggttatgctttgacttaagggaatgttgtggctggtttgattatctatccagaccactaaaactttctccatatcagaaatcagactgttttgctttcttatcattcatgtgtttactggagtagcacttttaatttccttcaagaacttttgcttggcattcacagcttggctaactatttggcacaagagacctaacatttggcctattttggttttcaacatgccttcctcagtaagcttaatcatttctagcttttgattgaaagtgagagacgtgtgactcttcctttcacctgaacacttagagttcattgtagggttattaattggcctaattttaatattgttgtttcagggaataaagaggcctgaggagaaagaaatagacaggggaatggccagttggtggagcagtcagaacacaccatttatcaatggagtttgccgtcttgtgtgggcatggttcctggtgcctcaaaacaattacaatggtaacatcaaagatcactgaccacagatcaccaaaacagatgcaataattatgaaaatgttcaaaatattgtgagaattaccaaaatgtgacacagagacacgaagcgagcacttactgttggaagaatggcactgatagacttgcttgacccagggttgtcacagatcttcaatttgtaaaaacatgcaacacctgcaaagtgcaataaagtaaagagcacgaaaataaggtatgcttgtagttaacatgaaaggaaagcttccaaagtggtgacttgggtttgaaagggctggtcttgatctaacactaaggagacatccagtgaactatctggctacataacttttttattttattttattttattttattatactttaagttttagggtacatgtgcacaatgtgcaggttagttacatatgtatacatgtgccatgctggtgtgctgcacccattaactcgtcacttagcattaggtatatctcccaatgctgtccctcccccctccccccaccccacaacagtccccagagtgtgatgttccctttcctgtgtccatgtgttctcatcgttcaattcccacctatgagtgagaacatgcggtatttggttttttgtccttgcaatagtttactgagaaagatgatttccaatttcatccatgtccctacaaaggacatgaactcatcatttttatggctgcgtactatcccatggtgtatatgtgccacattttcttaatccagtctatcattgttggacatttgggttggttccaagtctttgctattgtgaataatgccgcaataaacatacgtgtgcatgtgtctttatagcagcatgatttataatcctttgggtatatacccagtaatgggatggctgggtcaaatggtatttctagttctagatccctgaggaatcgccacactgacttccacaagggtcgaactagtttacagtcccaccaactgtgtaaaagtgttcctatttctccacatcctctccagcacctgttgtttcctgactttttaatgatcgccattctaactggtgtgagatggtatctcattgtggttttgatttgcatttctctgatggccagtgatggtgagcattaacatgagcacttctgctccaagctgtctgtgccatcacagctgcaattgagaggcattccttattctccctccctcaccaaaatgtaaatagctgtgtttattttttctgattgaatggttaatgcatgctaactataaagaagataactaacaaatctgaaaactgaaaagaaaatgttccttataaacctctagaagtttgtgatagcaacttcacaatgaaactgtatatcattccaaatatttaaattaaatatgtcaaatacaacatatatttatccaaatgagatcatacaatatgcactatttcatcacttgaattttgcacgcaataaatcatgaagcatgctgaaacctacttggtagtattgtaggatgtagctctccctagaaacctggctctttactgaggaacatgcagcatttctagtttctgctactaaaaatatcatttcataaaccttcagataggtacacatttgtatgatcacccaataatttcctaatgaagtgcccagaagtagaattgccacattaaaatgaatacatattatcctacagatttttacaatatccttcagaaatattgtaccagtactcacccttaccgattgtccttgaaattgtgttcacccaccacttaaactatatcagatgttattctttttaaattttgccaatttgatggataaaactaatatctcatggtcagtataatttacatttcttttataacctgatctgttcattggccacttgcctttttttcctttttgagtttcttttttcactttttttgtttattatttatttgtcagttttctcccctacaccttctccattgtccctttctgaaacttcaattcattcaattttggatgtatattttggtttttcttttgcttcatattgtgtgagaattctgtttattttctagactgtctaacgacttgctatcttggcaattatatctctaagaagtctttattgttctcagattgttctcttttcatagtcccttcttcttgctttaaataaataaatatatagatataattgctgcttcttaattagcttatttatttatttatatctatctatctgtcatctgttatcatcatatgtagacacatcctttaattattttggcttccaagagaataggttgaaatatcagcagtatccgtttatatgaagttgcccatattgtgcacaagttccacactctggaagtagttttggaatggatggagggagagaggtattaccaggtttgtgactgccttatagttcccagtatcctcaatttcctttttcttcacttttgaaacatttgtccattttcacagaagccatgattaccatattagttagagtctgttttggcacaaataatgcaatgcattcaagagtagctaaacatgttactattacaggatggatattgttgtttttcctcatgtgcctaggatctgcttcagaggctcaggactgtcagaaccatgatctgaaattcctgtggcctttcctaaatggttgcaagatggaaacacactcttgttttctgggagggggagagtgaagagataaggaagaaagagtaacacttagagctggaagcagaaactgcctgctgtcatcgcattggccatttagaacaatttcccagcatccctggggtttgaggtgatcaagtgacaccgtgactggtgcagacactgctagcttcctatctattgcccattcttaacttctttcttactaatatgactcagagttttgcttagtctgtttttgttttggttcctgatagattctaggacttttcggagtgacctgttaattaccttattttaaaactccccaacagtgcttagcctaggcttgagcacacagcaggtgtccacagttcctggaatttggttggctgccagtcaagaacttaataaaacatagctactacttcttgaaattttcctatgccaagtacacttccaaatgcatcacgtatattaatacatgttatcccaccatagccttatgagatagatattattattattacacccatttaactgatgaggaaacgaaagcacagagcggctaagtaacttgcctgaaaccacacagatagaaagcagaaaggagggaattggaatttgaaggcaggcaggctgcttcctgcacttgtttgctaccgaattgcactagtaaattaagccgtaagtggcttacaccttcaaatcttcattacgtgatgaaaagtgataaaaagcaagaaaatatacaactactttaaacctatacattaaggggaaactgacagccatgtaaagtcaaggagctaaagaaaccttgatggtacagacgttccatctctcacctctcgtccacgtggatcacaccgaaaatataatcaccttcttcctcattcattctgtgtttgtggaaacttcccagtgatcaaagctgtcttggggtgaagggtgagcccagccgtaaagtgagctctgtgaagactgctgcctttcctccagcccagggctgtcaacacagtggctggggagtgttgtgtgactctcctttgaagcaataggtccattgtgcaatctccatagcatggcctagtgggaagacagaagcccaaagggcccagtgtaagctcatccagaaactaggagactgcagttccacatctataaaacaaggctagtttggatttctgggaaggaagtagtttataaaatcagcagataatatgtagatccagatgtaaaatgttggcaggcacaatgagggtggctttttctcaccaaagagagcctttgatctttgcacagagccaaggtggcaactctagcagcctagtttaacttcatttcacgatctgtgaccttggttcccaaactttcatgtaaggtattgcccatttaacagggaaggagacctagtcatggcctctgggaactggagaaatatgtacagtgctccaagcctccatgaaaataggcagacccagggatctgactctccttttatctgtctcttcagagccctgctcatcttctctagtctcttctatggcccaacaggaaattaacatgacctttgttctcacagcatagcagccacggtaggctaaattatgctgcagtaacaaatcacctaaaactctttgtggcttaccacaagaagttgatatcttggtctcataaagtagactgcagatctgggtgattctccaggcaattttcctccatatttagcaagtcagattgtttccttcttttggcctttccatttcaacactaagcaatccccaactggtgcggatgaagaaagaggtggagggtcaagaagctgtaattaattgcttgggcctaggagtggccctatttctattcatgtttctttggtgagaactatttacttagccatacctaaattcaaggaataccttatgattctctgtgtaactgaaagtagcagagtaccaaatattggtgaacattaactctgttgatcatacagacaaaagctgtcttcatttgctaaagagttccatctggctaacctctgagctattacctttgtgttagccagattcaggattacggagtcttggtgaggaagaaacttggaggccattagtccagtttatcccaattcaggatccttgatattaatcctaacaaacgattatcaagcctctctttggacactttcacgatggcgtctcactatcttatgagccagaaaattccatgttgagacagctctttgtaaaattcctccatgttctgatcctgtctaccttcctggcagggccacttctcaagtccaattctctatgcttaatagaactggctctacccacccccactctcccatgccccttcaaatgcctgaggccattggcatgtttcctccttgctcggttccatagcctcagttccctccaccacccctcacgtgacctccaatttctccctgtcttgataaccactctgtatgtcaccttcttttagtgtagtattcagaacctcttggtctgatggttgtcagataaagtgttatcactgatcttgttctaggtgttgcacgattctagcagtgtcaccaaagcagcattacttttctcagcaaccacatcacactctgggtttatattccaactggagttattgggatttgaagtctaaaactgaccccctcttcccttccaggttctgtcccatggtttataggcaaaaagagatgtaaataaaagtgacaggctgattaatggttgggcatgcatcccaagattgacaaaaggcaggcctctttgatttaaactggaatagagaattcatcttgaatttttgaggctgaagggtgaccgcagctctctgcattctatattgaagacaactgggaactaatgtaaggctgacttaactcactcatttgaaggtaaagaaactggaacacacacaggtatgcatgcacacccacatacacattagaagatggccaggcctgcctacagaagatgagcccttggcctggccacttatgcttagactgcagagaaggaggaagaggctactggccttgaagcaagctgtgaaataaatgggtgaaaagacacagtagtcctgtccattagctaagggctctgagtaatacactttctttcctttttttttttttttttttgaggctgagtcttgctctgtcacccaggctggagtgcagtggtgagatctcggctcactgtaagctctgcctcccgggttcccaccattctcctgcctcagccccctgagtagctgggattacaggcgcctgccacaacgcctggctaattttttgtatttttagtagagacggggtttcaccgtgttagccaggatggtcgctatctcctgaccttgtgatctgcctgcctcgacctcccaaagtgctgggattacaggcttgagccacaggcttgagccatctttatttaaatgtctactagaccacttcccaatctaacaagatcattttgaatcatgatttgatgatccaatagattaatttttccccattccaggtgatgttgactggttttgtgttatgcaacctacttaggggtaggttaaattgtcactgcaacacaatttaacctaccctggctctgtgctttgagaacagaggatatgtgagtttcctgttggatcagagaagagactagatgggctgggcagggatctggtgagacaggagagcaacagttacagagaagtgggacacacatcttaatatttctaaccaggctgatgctccttgagtatcatttttagctataaattaatatgtcacatagcacaagattaaaaaaatagtatttgaatgtgttctgctaaaattttactaatagtaaagccttcccaaagaggaaatgggattggtttgtcacggcttgttcttggtgaacccctgttggctcaccttttccaggtatgccaccatcttcaatgtaatggcttcacttagaatctgtctatgaaggagtatcttgtcttgtcttttggaatccacccttttcttctttatgctcaccaggacaacatctgtccatctacctctttactaggctgatagattttttaacattcgaaaggcttttgtgcaagaagaatggttatacttgtacatcttggattcgataggaaatttatgaatcttaagattgtaataataaatatttttacatgatgataatatttcctctaatcatatatttctaatataatctttcacaattatgaatacaataaattaagcatttcctaatgtttatacatcattagaaatctatttgatcaaactttccacttaataaaaaatgcagatcaaatgtatgagattctctttaatgtcttacatgctttgtaatagtggttaaatatctgaatctcttctgagtagctgccccaatctaggtctcctctctgcctgagtgcgtgggaggagcctgtggcccctagcaatctgaaatgactccttggccaattccggctgaagggctgatagcagaaatgaaatgtgcctcttctggctaaaacactaaactgctagaacaagaccttccagtggtcttttcctctgtctcatggtattggttgtttttagctacataacaaattgcccgaaaacttaggagtgtaagacaacagacatttgttatttcacagtttctgtggatcaggaattcagaaatggcttcctttggtggttctggctccatggtctctcctgaggttacagcccagatgtaccctgggctgcagttatctccagagtggagctggaggatttgcttgtatgactgctcacttacatgctgttggtgcaaggcctcagttcctcactggctgttggaaagaggcctccactccataccacatggacctctcctaggactcattgagtagcctcaaacatggtagctggcttccccaggaatgagttatccaagatataataaggcccaagtcacaatgccttctatgactggtcctggaaaacacaggttgttgcttctgacacattctattcatcaaaggcaagtggctaagaacagtccacacttaaggggaagaagatcagtctccaatttttgaggggagaagtataaaataatttgtgaacaaaattttaaaaccatcacattgagtgactgaacaggctgcattttctggatgaggcaactgcaaggctgtggagcctctgtcagcctgggttcttgagtgacctggtggagcagagggccctttgctgaactgagatggatatgaagcacaagaaagaaataaaccttcattgtatcaagtcactggaattttacctacacatcctgactagtagtcattttaagacataaacataaataaaatcacactgataatatgtaaatgtggttacaaaattatgaattctctgtgtttaaatgatttttatttgaatatcattcaaaaagtttcattttttacactcacatagggcttcagtaattctatgagatactaataatcacagcagatcccaaaccaggtgcataccatttcaggagagaagaagttgcagattctggtccaggataagtctgtttgtttaaagtgatccaaaccaaaccactgattgagtgccttttgataatacagttctatttgttacatttggacttttaagcctctgcctttcaaaagctaaattcaaagatttaattttttaaaacttggtgtctttcccagaaatgatgtattgtaaaaagtttcttatggctagctggcagtacctaaactattgtcctgtcattatgatgaattggcctagtctataaatattaattgtaaacttatgcatgccttatcaatattacattataattagtggggtcatcttgaggttccatctactaagagatgagagatggagtgtgtgcaatgtttagctaattaatcatcttagaacactgtgaaattccctgtttaattggttgctgtgtaggatcacgagagcaatcaattgtttgattccctatactatgcatgttttgggggattttagtttatttatagttccttgtgtttattctttcttatgcacagagatagtgagaaagataactctatactttgtaaatggatatatgctcaatagaaaaatgtaaatacaaacataagtacttttctatttattaaagcaataaaactaaacaaatcctaacatgtgcattcttttgcacacattatattaactttgctttttcaaatattgttgtaaatccatgatctttcacaaaatcaacttgtttcagctaactttgagtattattttatttttcatgctctgcttggtcgatgggacccttcaaactgatacctttgtcctttcaacagcaacttactgtcatttttaaaacagtcttgttttctggcattgaggttgtccatactcaatattttttctgtcctgagatttgggaccaagtgtcttaattccttttggtagaaaaagaatcaaatctggaaccagaggcacacaggagctctggcagatgctgaagccacctagcctatatcctttctcaccttctgtgatggttaattttttgtgtcaacttgactgggccacagggtgcccagatatttggtcaaacattattctggatatttctggatgacattagtatttgaatgggtagactgaataaagtagattgccctccctattgcgggtggaccccatccaaacatttgaagacctgaatacaacagaaagactgaccctcccgagtgtaagagggaactccttttccctgactgccctgagctgagacataggtcctctcctttggacttcaacagaaacatcagctcttcctagatcttgagcctactggcctttggactggaactacattcagtcccttggttctcaggcctttgatttcaaactggaactacaccaccagctctcctgagactccagtttgccaactgcagatcctgggacttctcagtcttcataattgtgtgagcccctttcatatcataagaaacactctctctctctctctctctatatatatatatatacacacacacacacacacacatacacatatatataatacatatatatatatatacacacacacacacacgtatatatatatatatatatatatagttgtgtttctctggacaaccctgactaatatgtcttgctccttataagaactctgattgcatgcaggtgacaatgtgctcagctagacagatgtgccttcacggactcgtgcagctgaagatggcccaagttggcatggtctaagccacatcaactcttgcctagatcattgtagctgacttctagttcctgatcccgctttgctccctaaaccagttcttctcacagcatccagagtaatcctctcacagtgtaacctgatcacatcactttttatgcccaagactcgccaatggcttccattcctacaaagcgagagcaacatctctacagtggtctccaaagccttgtgtgatatgaatactgaaagtgtgcctcaaacatggaaaggaattacattctacacctgtttctcccatgtccacttcattgttcttcagcaatgcagcagtgtgtggataaaatctttccatttcccattggattcacagtcttgaggtatagtcctcacatattacagtagacgtggtacccattgacttgctccaggcctctttatgctgtcgtcacagcatgctgtaccttgtcctccatctcagtgtatgactgtgtcttgtgtgctggtcctgggtgctctggcacctcaccagagaacctctgacacagatagttacaggcaaatactcgttcttctgttttactgtcttggatttcttctgtaaagattggggtagaaggtggggtacaacatacacagtggatacaaatgagaaagattcaacttagtacttatttattcacttcacttcatcccacaaataatttgaaggggcttatatttcagcttagtattaagaagagctgcccagcaaagactcctaatggaacagaaaattttaggaggcagtgggttcgccatctcagcaggcattcaagtacaaactgaaggacaggtcgctaaggctgctggaacaaagtgttctgagagcagcccactctggatgctcagtctgcttcctgtctagttttccctgggatgttctcctccttctgagctccactggctgaggtaaatgctgttccttcagaaatcctagagaagccaaggacccgtcaccatagttatgttcatcatagacataaccatgacaaaagacaggagaggacccccacctctcttttcagaggttcatcttctgacagcgatgatacagaggggagggaagctggggaaatgcaccacctgattacatgacatcagcatcaggggatggattagaagttaggctgctctctaaaccaatgaaatgagtttgatttttccaccctttctcaagaatccctccctctccattgcttcttctagaggattgatatttaaaagttgtttttggcatttgtcaacatacatttcttccagatgttaaccaaagatcccagaccagttttgatggcatggaagtgctcaaataagtcataagaattttttaaaagacgaaattggtggtgagtccagcctgggtcttgggtcttgaacaggattttttatttgctgaaggcaaaagcctgtcctcaatgctctcctggccaaaaatattatttgcatttaaagaaaaataatcaaatgcttttttgggtgcttacacttatttttcccttctgtttagactgaggacagttggaccctgttctcagttaacctcaacattcccagccccctgccttcatctctaattaaagagataggacaaatggcattttaaatttctttaaaatttttcaataaacaaacacacatttcagcatccagcattttatttattctaacatgttcagaataaatagaacaaacagaatttacattctctgctccccacttcattttacatgccttgaatgaaacatctcaccctccctttagaaaatatgacatctattccaatgaaatagatgaagatcctgagttgaaaaacagtctgtttttacttgcccaaattcctacagaaatgaacccagtagaacctgggagttcttggctggaacaaatttgttgatggagattagggcctaatgtttttcttttagttttcaacttagatcaagaaacagtctgattttggaaattaccctgtaggaaagatggaagaaataattttttttcacagagtctgggatgtcatattttaaatatgcacaagaatatgtgcctgcaaaagagctttctttgagcagattgctgctgttgcctgctttcgtccttgtgctgaaaacctgattttggagaaggaggatcagtgtcaattctgcagagggaagaagaagaaaatttcaactgggtatatgtatttcaatttatctgctattcactttgtggcaggttttatattccaaaaaagagtacaacaatattttccatcctacatgctctttgacaatgtgactttgcaaccctcacatagacagactccatgttccatcctcttgaattttatgagcttgtaaaaaaaaataaagcaatacatcttcctccttaaccacttgaatagtagtgctagaggcctgaactgattatccatgtggccgccatcttatgaggaagacaaggtgacatggagacgccacacataggagctgagtgaagaggtcatcagatgattcctgctgccagcggtcaagtcacacccagctattctaggaatcccagcagaggctgcagaccttatggagcagagacaagccatcctactgtgctctgactgaattccagacccaacagccatgagcataataaatgaggatggtgtctggggctgctcaacaaaaacccctgtgacattcttgttctcaggcgcctgtaggagctctgcacccccacgttcccagggtaagcagagcagcctctgggcagtcagctggcctcaggcaaaggcctccacacagattctaatgagtggcagagccagcagagtcctctcagaagccgcagcctcctgtgggggctctgattatgctgaaatggatctgtcttgaggccactttgaactcctgggaaactctgcaagttgaaagtattatccaccggactggctgatacatgaactgggcactacggttggcttaactttacagaggggttggaagtcaactcacatgtgtggagcatcccctctgtgctggaccttgggttaaggttctctctgctgcaaatcctaggcaataagccctgaactcaacaagtctcagtttcttcgccttagagttgctctctctgtaaggcctcaaggctgataagagacaggtcttcatcatctcatcacttggtgaaaaacttggtgctgggcagagcatggtcaatatttgctattaatattattatcctcagtacctaaagtcaactccacaaagagagtattgtcattctcatctcatgtacggtaatgagcactcaggaggctgagaacttgtgaagagccacaagcctctgagaacttgaactagaattcaaacccaggtctcctgtcctccaggcagggcaccaactggcagccaccacctcaagcaagcatcccttgtctttggcttggacctttgcagtggctgccagtgaggtctttgtccaacttactttctactctgcaggtatagcggttggagggaccaaccactcacagtgtcccctttcccaggttgcgactgcgtcccttacccacagcagtttaatccatagagatggaaaaaagaatgaaagttgtcaggggctgggggctgggggttgttgtataatgggaacagagtttcagtttggggtgatggagatggatggtggtgatggttgcacagcaatgtgaatacacttaatgccactgaatttaaaaatggctaacatggtatattttatgttatgtgtattttaccacaattttaaaaagtgactgcatcccctaaaggatgaggcccaagctcctccacatggcatgtgggactctccctgaaggctatctggtgagaccttagccacccctgcagcctcgtctgcctgtccctgtctccctagcccccgcagctccactcctggcttccttacgcacaccacaccatttcttcttcttgctcaagctgttcctgagattctccttaattccccctctcttctcattttgagggctcggcctaggtgggggcttggcaaggccacctctcctcacaggcctcaggcttccagcccgtgctctgcgctctgatgtatttgcgggcccaccctgcagaggactgtggtgatctcgccatctctctctgctaacatgggggcttctcagactaggagctgcccccaagtcatcctgtgactccagctcatcataccggtgctggccaatgatccaaccagctggagcagcagcaaccacgtgggcagcagcctggagcccttgccggggagcggaggtcctgagggatggtgtggccctgaactcaccctgacatccacatctgggtccagggatgtggggtggaggagactggcctgagggtatagggttgcacaggtgggacacaccctcaccctgcatcacagagggctgcatggagagtgggagagggtaggggaagacattgacagggaaggtgtcctcttcctacgtagaggccagggctgtgggccaggatcagatgcctcagtgctcaccttccccatctctggcagaccctctggactgtgacatcctgtgggtgcttgtgtcagagctcccaggacagcagaggcagggatggggccaaggggcatgtggctgtcaggtgagagggttggaagagggtggtgagtttcgtactaccctttcctcctgggatcagtggctgaggtgtgacctggtgcccagcccagtctggacccaagcctgccatgctggtgtctgtagagaggcaggagcctcagagctccatggcgacaggccttgccaagtagctggtacgggtcccttccccacagcatctccctcagcaaacctctctgggggtgatgccacagtgatcaaaggcatgcattatggagccagcctgccctggtttgaatcccatttctagcactgactgcctccgtgaccttgagcaagttgcttaacctctctttgtttccatttactcaataataaaatgaggacactgatagcacccacatcctcaggttgttcagtgtcggtcctgtagaaaacattatgtagatcctgggtattaaaattatgaccctgttcctgagagaccagtagggagagttttggatgacgattctgagtacgacctggtagatgaggtcctgtgatttgtccccttggggacaaagccaggccattgtcactgcaggttagctcctttaacttttccaagaggcacatagaccctggggctctcacagccttcctgccctgcataccacagtgaccccacgtccagggcaggtttgggggtctaggtccagggggcacgtcggggcatctagaagctcctccccactccatgtaggctggcccgagcagtgctgggggaggcgggccactttgagccagaagataaacatattaactgaactttccatctgtcatttcagagagtcatttactgcctagctgtggttggaaaaattaagtccttgtaatttagagtcaacatttctcgcagaatcatgttagacaagttggcggcattcgcagcctctcggcagttgcctacaatcaaaacaactttgccctggacccgtggactcccctgccagtggcatggctggctgttctgcactggatacagagcactacaggccatggggcaggcctgggaacaccaggctgggggcctcaggaggagcggcaaggcagagcaccctcctccagggttttcccctttgcctaatgcaaaaccaatctcccatctattagtgtgcaagcgccgccgtacaaaacaccacagaccgtccttaaaccatagacatttattttctcacaattctagagccctggagcctgcgatcaaggtgtcggcggggtagatttgtcctgaagcctctctccttggcttggagatgtcgccttctccctgtgccttcacacggtcttactgctgtgtccatctgtgccctaatcacttcttataaggacatcagtcatattggattcggactcaccctactgacctcatcttaacctagtcacctctttaaaagccttatctccacatacagccacattctgaggcactggagttaaggacttcaatgtatgaatttgtttggggggaaggtcacaatttagcccataacacccagtccattttggattagttcattctcagtctacccaggagaaactggtttcattggctccattttgcagatgaggaaactgactttggaaagacaggtggtggtccccaggtcccacagcagcaatgccaggccgggaagccagggctgggatttctggttcacacaatttgcatcagagcccagctgtgtctgccccacagccccaaggtgagcattctactgggtcccctgcacaggccccagaaacccccagaaactccatgcagatgacagggagatgggctgcagcacaggcggaagtgtccagtagtgggtggggagccctgggaagcctcaggcagagacccctgcttgcctcgggaggttgtcttcagtgatgaactctgtcatacgccgtctgctcttgctgaccctccatccttacccaacctgaggggcttccccagagactttctcattattcagcctagttttagtaagggagatattggggcccactaagtgctggtgctagacaacttagtttaaaaaggggcggggcatggtggctcacgcctgtaatcccagcactttgggaggccgaggcaggcagattacctgaagtcaggagttcaagaccagcctggccaacatggtgaaaccccatctctactaaaaataccagaagtatctgggcatcatggtgggcaccttaatcccagcttcttgggaggctcaggcaggagaatcacttgaaccagggaggcagagtttgcagtgagccaagatcacgtcactgcactccagcctgggcaacagagagagactttgtcaaaaaaaaaaaaaatcacagcaggctgtcccagaatcaagtgggcttatccctagaccttaggctacgtagtggatattgtaggaccagcccaaattcctcattttgaaatggggaaactgaggctcagagtacggccctggtttatccaaggtcactgtcttagtccatttgcattgctataaaggaatagttgaggctgggtaacttacaaagaaaagaggtttatttggatcatggttcggcaggctgtacaggaagtgtggcaccaacatctccttctgataaagaccttagggagcttccactcatggtggggtggaaggagagtcacttttggtttccttgactctgtttggtaaaggctgtcctaattgtatgcaagagatggcagacacaggcaggcagaggagagatcgatctttcaaaccagttcaggcagactcgacttctccccagcggagcggagcaggtcactgccacacagatctgcagtgtggtctccgggagcaaaaggcatgtggaacacatcaactatatgtggccatcagaaaacttgctctcataaaggtctctctccatcctgcacctacccccatattctgaggtggaaactgaggctcagccaggctcagtgacctgcccgaggccaacagtgagagagaacccaagttcccagctccagccccaggacagtcactgagactcagtattgactttcaggtcccacatgggtttcagcctcacagagacctgaattctgaccactgggccgtggtccctgttcggaagccctgctgacagggagttgagtggggcatgcctccaagtgatggcccctggaccaaggccagggcatctgtatccaaagtggggagagttctctgacacccctcacgctgtgtgccaaggccccacacacatatgctatcatttccagggcctcctgccctctgtttcccctgactggggagaagaaaatattagtgtggctgccccaggggtctgaggtctgctgcccctctgtgtgtggcattgccctaatctcccagccctgccctcccacaggctgccctgctcccccgcccctgcacttccttaggaagatgcacagggaaggaggtacagcgcctgcaaatgagaaatccatctcctctctgctccagccctctgccttgggaactgcagaaggcccctctcctgaccaagccctcccggcaagaaagaactctccttgaaaacatggttctttgcagctgcccaggacagcttagtgtgtgtggtctggaggcttcctctaactgtgaatccattgaccttggaagaggggacacctgtggtgggcagattctaaaatggccccaagattcctgcccctgcgtgtcaacacccatttaatttctttcgctgggctatgggcaggacccgtgaatacgctgcggaatcacccttgtcatcaggttactgtacctgacaaaggggcctgggcagctagaattgaagtccttgatcatttggctttgatttaataaaaagggagattatcctaagtgggcctgactttattaggtgagaccttaacgggaacacctccaaagctttcctgttggtctgggagaaagcaagcagccacacccctggagggcaccacagggccagggactgccttccgggtctctagcagctgagtgtggcctctggttgacagtcctcaaggaagcaggtacctcagtgctactaccacaaggtgctggattctgccaaccattcaaatgagccagccagctcccaccatgatttcagtccagggtaaccctggccagaggacctcaccccactgcacctggaatcttggaccctggaaactgagatgacaggtttgcattgttttaatccactaagcttcgtagctatccaaaactaacatggccctctccacccccaggttcctcctcctgataaatctctcagagctcagcctggcatgacagtgggcagggatatatctcagttcaagcatgtttgataggaaaagttaatcatcatgctgacaacataacattgaagcaaaaataaatccgttactatcatggttgtgggacagaggtgggaccaatgagagagggagacggagagagagacagatggacacagagagaaacaaagaaagaaaaagacacacacagaaagagagacagagaaagagagagagaaagagagagagactcagagacagactcctcagctgtcacagacacagtgcttttgttacaaatgctttcatcttgcttctgctttactcattcatttatttgtaaactttgtcgtcctaatagtgccaagaatgaaataaagcttagtaaattaatcctcactacttctgattagaactttatttttctttctggggaatagctggtccctgcagacaaggcagctagctctggggggagagcaagcctagatggagaggctctctggacgtggcaccgtgtagctcagcagcaggcatggcccttgggccgcctgggtgtgaacatgtttcccactctgtaaagtgccccagaagcaataattttgtagaaggtaaatatctccattttgaacctggaaaacggaaaataaggatggcagttgagtcatttgctgtggtttcaaggtgcatctgggacctcatgtatagtgttgcctttcttaggccatggtcagggcattgaagggtgacaccgagccatagacaccaggaaactttcccaagggatctcctggcagcactcagctcacagcaggcccttgtggccaatgtagccctcggggcccttgtgccctgaggtagccagtccctctctccttcccagcacagagcaggccagcctcctcagtggggaaggccatgtgactgattttgaccagtggggtgtgagtgggagtgatgtgagctgcctccaggatggagcatttaattatggatgggagccactttacatctcttgcccctctacaatctgcaagggggacccacaaacctccaggcccagcagcttgcattctgagtgaagacagtgaggagcagagtgcccagttgagccactctggacatgtaacctgagtgaggaacagacccgcgctgtttggagccactgacatttcttggttagttgttactgcactaacctaactcatattgaccagtggagcctgtcagggtcacttggtgcaagcaagtatccttactggccagatgcctcaatgacatgtgtactgacctgagccatgcaggggtgctgccttgtagagtatgatctggagttaggaggtgcgggacagacaggtttcctggttaacagaggaacgtttaaatctattggaactctgaagttcttcaattttattttcttgtatgcagaaatacttgaatttttatttacttgtacacagacatagtatatatgcagttatgtttcccacttttttgctcattttaaacatttctccttgttgctatagaatgtgtaagaatcacttttaatggttgagtaaatacttcgagtgggttatgaaagaacttaatcatcgttccctgtggtgggacatttgtattgtttgcagttctgtgctcatataagtaccactgcaataaacatcttcgtgcataaagcttgttttctgtttaatattatttactttggcaaagttcccaaaaatggaacacctgggcagaaatggcatgaagacttgcctttttcaaacaggtttttaaagtaaagcattcatccacgctgatgccataggatggtaagtccggggaaagtaatgcactctgtccttaatcatgaacactgagccaggcctcggcctccgacctgactgtctgttattactctccaggacttcagggatgcaggccaagctccagaagtccaagcccacctgggggctgtgacccaagaatgggacccaacagctttagctccgtactctctggctctagcccagctcacagaactcccgaggggccaccactgtccccccagatacctccactgactcatcggccccccagggtgtctgctggtggtcggtggcagccctccttctccaccttgaggttcccaagcacatctgcctctggctgctgatgccacctctgcaggctcagagctgctgccctgccccaggctacggcccctgcctgttgttgctcctccctctgagtggcagtgcctgcagctcactggggtctcacagctggagtgctgtaggtatatcctctattcaccgggaaaatgtctgtgttgggctacacaccaggatccctggggcccagctttttcctgccacctcttctagatctttcccctaacccacagtcctggcttatctccctgggagcctgagaaccctctgaggcactccacagtgcttcactcaaatcattctttcccttccgtgcccacgcaaacctgtgcctcaggcaagcctttctctcgtcaagggtggcaaagactgtctccttgataaaattttaaccaggctcctctgaaccctctttccacctagatcttggccttggtctgtccttagcaggctaagcccagttttagcaaagaatcctactaactcagttgatgaaaatcttcctatccttgatagctgatcaaactcctcttcctccacccctgattcctacccaaactcctcccagtaattttccctccaccccttctccctgctttctgtaaattcctgcttgcccctggtatattccaagttgagttcaatctctctcccctgctgcaataatcccaaataaagtcttgcaatttttaacaagtgtcagaataattctttatgacagaggatatttcttccatccaggacaacaagatgggagaagttagtatgtggggtaaagttagccctggggaatggctgtcaccatcccctagactacagccttatctctccgataaagaacatgatccttggtgtaaaaccaacccatcacacacacaacagtgggtgggtcaggagatggcccctggaaactggaatatcatgcaggacatctgtgctgtggaatttctgtgctgtgttggagagctgggatgccctgataaaggaatgttctgagcatcttccctagagaacagagaataccatgcccccctacctagcatcccagccttaccttcaccccacagcatttccctttaggccaagtatccattcatttagcattcattgattgtgttcctgctacatcatcttgtcttaaattattagtggaaactcagtatcttcagggtttttttctcccttaacttttagttttattctattcattcagcaaatatttttgagtggctgagcacctgtgaggttctgaggacaccacgatggagtgcgaggtggaccgaggctctgcccttatgcagctcccagtctcagagagaaattgacctgaagcagaagttttgtgtctggcaagatgatgcctggtctcaagactgagttgtcaaagactgggtcacagaccggaaggtcaagcatctagacaatggtttctttgtgtgcatgtggcatcaaacatttcaagtagattgcaataattttcagggtgtgataggaaataaattatttgcacctttcccacttccttctccttctcctcttcctctcttctttctcttccctttcccttcttacttgattgtcccagaaggtcttgaggtaattccactgcaggcctgtgcaaactcgccctcaccatatcctggtaggaaggtggggcctcaggtaccagcagaagctcaggatggcagtggccgagccatcatccagtctcccagtgagaacctcacctcaggggctagtccctcttctctccccacctccaccctacctcctcttccccaccccccaacttctgccttgccactgtgaaacccttgcctggtcctctgaggaggagacgccacccctgcctcacttccctgcaggcttttgcctcctttgtggcccttgagcccagtgacgctgtggctgagggtgttggcagatgtttctcccttatcagatggcttaccctgaggatagagatcatctttctgtcagagcacctgacacacagtaggtgttcagaagacatgcatttagaagatgaaggagaagccagtgatccatcgtggtttccctctatagtggccacacagggggtccccttgctgtggccccacacactggccctcctgcctcagctcaaggcctctctcagaggccaaggctctcagaagaggtgatgtctggccagatggtgtctgaccaggcccacttcacctggggcccgttcagagaaggcccaaccatgccatgttcctgataacttgttctagaagtgtttgtattcttgaaggctccattgcaggcaggctgtgggactgccctgcagcgggtgagcctgtctcctcttcctcggggaagtgcgtcttcatggccagctgcctgcatctctggcccaccgaggtcacggtaaagatatgaggtcagcagttcaaaccaggtatccctgcaatacgtacaaacgtggaggaatggatgcagcatctagtgtgggcaagggttctagcaaaccacccccttcacttgggcaccctgctcaggtgagtggggtgtatatgcactttagagttcagatgagaaagagagaaagaagggggcaggtgtgagacagaaagagagagtgccacatggtgacaaagcaaagggccagcaacaaagtggccagatgagggggacacatccccttgagctctgctcaatgaagctctgcaaggctgctgagtgaaaaggacctttctgcttcacctctgcagccatccttgcctctgcctttagacatgttgcatggtgcacgcttgcggacactgccgcttctctgtggttcattcactcccaggcagttcctagcacatggttgctctaaacgcctcccttctctcgggtcccatctcctcctgctctcatgactgtctcctgcctgcttcccagccccagccatcatgtatgtttgttcagaactttgcaccttagggtcacctttctgcccatggtcacattagtccacacggcagcctcaaggtgacaccgctattaccactgcaaagacagtcagggtggcacccatcagggtcaactcccaattgcatgtctacttttgaggtcaagatagttctccacattggatggacagggaaggtgccatgcaaaggctgcataactgctccaaggtcccacacagcccatgagaagagacagagaagatacggcaggcagtctttgtgactggattctttcactcagcataatgcatttgagattcagccatactgctgtatggatcagtagttattttctttttattgatgagtagcattttattgtttgatgtaccataatttgcttatttactcatggacatccatgtgggttccagtgtttggaaattatgaacaaagctgccataaacatttgtgagcaggtctttgcatggagttccatctgggtccatctaacgaccaagcctctgttccttagccacgagcttccactgacacaaaacgcaattgcgaaagcacccatcctgtcaaacggccactttggaatacactgataattgtcactttgtttcttggggtgtatatattgggaggtttccattttctcataaaattaacagaattgagacccaactatagaatgaatacattaaaagactaaaatacccagcacacacaatagacatgtcagaaagactaaacaggaatcctgaccataccaacggctggtgaggatgtggagcagttggcgctctcccacactgtgggtggaaggggaaacagcacagccaccatggtgagcactctggcagtggtgggaaggtcattgtagagtgagccacgcactagccatacaacccagcaaccccactcctaggtgtcacccaagagaatgcaaaacatgactccatacaaatgctcacaaatgtttatagcagcttcgtttataattaccaaaagctggaatccacgcagattccatgaatgaataaacaaatcatggtacatcatacaatgaaattctatttatcaataaaaaggaaaggactactgattccacacagtagcacggccagatctcacatgcattatgctaagtgaaagaagccagtcacaaaaacaacacactgtctgattctatttatatgacattctgaggaaggcaatactatagaaacagggagattcaggttaggggagaggtttgactacagtggggcatgttcaggaaatattctatatggacatagatgatgaaatattattccaaatataataggtggaaatactctgtatcttgattatggtggtgattacatggctatatatatttgccataattcatagaagagtacatctaaaaggacaaatgttatgtatgtaaaattataccttaataaatctgagttacagaaactacctagctcagcagatgctctttgagagtgagtgagcccaagcttcacccttgtaggttatgtaaatgcataaacctctgtgaaaacagtgattcctgactgtcgctgcaagttaccaagctgaaggtgagcggcaagagagctgcaaggtgtagcaggagaaagtgtgccaaagcgcagagaggaaggtggggaggggcccaggcgggaaaggagttaaggtgcagcagggctcagagccctgcacctctggagtgggtgtggcctgcctagaagaagcagtaaccaggtggtgatggaaacagtatccctggagagaggggcaggtaggggcaggacaggggtcggggccctggctggggttcaggaaagacccaagattgccaacacagcaagaatagccgatctcaggggtggaggctgcagcacagttgggctcatggcccccggtgagacctgcacacaagcactcagatccggggacctgggccaggcactactgggcaccagatgaggtgctgtccactcaggagaccgggtcgtcctccccactatgagcgtgagaatggcatgcaagagggcaagggcccgcagctgttacttcacccaggacacagtccagggctgtagcccatgctttgccctgtgtgttacagtccatagcttctctggtgcccaaggtggccctgtgcaaccctatctcaggcagcaagatgtattctgggccccaggtcgtgtccctggggcacctcgatgtggccccctccaggcaaagtaacccagacacagggggttggctggtggtcagagaggtgttggcctctgcagccatctgactccagcatagcgaagtggtgacatctgtcacccctctgcagcctctggccctggttttccagctgcaccacttgaggatgctgcagagccatgaggtcaaagaagtaatcctttccctctgaagtgaggacctggaaagtccacatttgctggagagcaggggaggcctctgcaggatggttacgccacctgtcaccaaacggtccaacccagccccagtaggggtgtgggcagagcaatttgctccctttgaatatctagttctgtagcctgcagtagcttagggagtggcccaagggggtttccctagttaagtcctgccggttcatcacccaagactcaatatgcatctggcattaggcacaagtggtgagcccaaagaggcataaaacaaggccaaggcctataggcagacttacccactgactggagataaaacatactgagggatgatccagctgcctggtgcccatccctgggaagggcaggtggctctctctgagggtggtgggccactgcactgccagtgagtttagaagacatggcacctcaggtgctgggagcactttctgtgttctttcctcttcttgtggcttgtcctgcacctgcacctccaaaggctttattttcgttgtatttcattgctgggctctgctctagggtggggcctgtttaagaggtgcctgttccttggcaccaaaattgttctgggcctgctcatgtggcatccgcctcattgtgcactccctggggaccgctctgcctccaattttgtccctcaccctgactcctctgtgtgaggccctctgccctccaaccacagaggtgctgccccagtttgcccctggctccttggctccagggagaggctgtgctttgcatgttgagttgattccttcagccttactggaacgtcatgtacccgtcctgacaggatttcatgactcagaaatgtgaggtcttctttggctgcagagccctgtgtaatgaaagaagcctgggaaatataacctgtgataggctaggacttctccaaacctggacagtccctcagcaaaactacaaagccaattgtgaagtcccggcagtttgtggtcgtggctgctctgtttgccacatacagccagccgtaccttcagagctgtaggcaaatggacggagggaccggtgctgactcttgcaactgggtttcatcacggcagtgtgctccagatctctgggcatctggaacgaatgtgtaaggagtgaggacagggaactgcagcctttgtcagctccctctgcccaggtggtgggttggggaggcccagcggtgccaggttccgaggataacttctctgctgctagactttgattatgtcagagtctcctggccagactccctatgtgagaaatggggtggggatgtcatgggacaagtccagccaccaagccctctaggtccagggtctgcccacatgggggacacctggaggccagatgtgtgcccacagggcacctggtgagatgggagggtgaagagaaactctttcttgtgtgaactatgtcctctgagtgcggcgaacccccatccaagcctcttcaaatatttacatgtctacctaggcttggacagctgtttggcaagggaggcagttggtcaacctccatatgctttctaacttgaaatagtgcagatgagctggtccttgttaaatgaattaggctcttactatttgagtccaaaacctgtctggctcaagatatctggtccttcactcccagacacttgaagatccatgcagtgtttccctaccctcagccatccagtgccaatgtccagccatttataatttacttaatattttctttaaattgatccactcatactgcctacataaatagaatttaaaaggaaactttataccacaagtataaataggaaactattaatacttgccataagtagaagggaactatattttaaaatacaatgaaaataaagcaagtttattaaattctagcaggacactgttttgccaagtttctcagattgaaactgttctctctttgttaaacagtgaaattatcatgtgttagagcagtgttacagacatgcctttgggaatctaaagagaactagaaagagaatcacattcacattacaaaagtcagtgttattttattcattcagttactaaatacccagcaagtggttgagtggagtggatagttcttaggactacaaaggcaaaattaaatataatcctgtttccttgtagagctcatgatctagcagagaagactgacaaggaacaagtaaataaattttaaaaaatcaacttcagtttgtgggaagaaaagaaagcaaagtatgtgcatagagaggagtatattttgagtaggtgtgtgttgcaatgtggggactgcacctagagtgaccttcatactgagtttgagactccaaatggatatttgaatggtgacctgaactgggtctatgtggaaaggctggggctgaaatgataaatttagggatagcagtagcatagatggtgttcgaagccacaggcccaaatgcctaggtggcacacgtgcatgaagggtgggatctgagggctgagcccttggtcccccacattaacgagtcaggaaggagagaaggagccagccagggagatgaagacaggcagacccctgtggtcttccgtggttctgtggaaacacaatgagagtgcttggaaaggatggagcgattgactaaaaaacgttgctgaggcattgagtcagatgaggacccttgggtttgacaagatggcagcacttttggtgggacagtaagagtgaacacctcattggagcgggttaaagagaggacagggagcgaggaaggggagacagggagcacagtcttctcttgactttttcaataacagtgctggtgttgaagaactcatctgcctgcagcagctcatgagccactcgaaatcaaactgtggatcacatggcctgaaaatccaccctggatacccaacccctgagacaggtaacacccccaggagggtgacttctaggttagttttcccccaggaagggtctttcctctctgggagctggggacccgggggcccgcactcaacacagacgtgtatagcagcagggcaggcccatgccagggccacacggccgcacacaacccgggcccttatcccagagcacagtgaggcgccgggctagtcatgctgcagcatggatatttattgatcttgattcacacgatccaagaaaagcttggccacagagcctttggttcaatcacaaggatatgggggttgggcatgggcgaaagagaaggaaatggaatttaaaggaatctgtctttaagaaaataactctttgtaaacctgatttatgggagcctgtgcatgcaatagtgaaatgctctgtaactccttggaggtggtgtgaataggggttctgttagccactggcgggacctccagaagcaaaacatgccagggggatggaagagcggccttcctggagtcaatctctagcagggcctgcgaggaagtggggcttcctcctccagccctcggacggcagcctgggagacgggagagcgctaacattgatgtgcatttttattttgaatgaacagagcaattaaagtgcaccagggccagatttaagttttctccttgggctgtttcgaagctgccttcagtctgacctcatctgcacccacacatttccttttatagatatatatatacaaaagatataaatacatatataaaatatataaatatatataatatataaatatataaatatatataacatataaatatatagaaaatatataaatatataaaatataaatatataaatatatataatatatatgaatatgtacatatatacatataaatatataaaatataaatatataaatatatataatatatatgaatatgtacatatatacatataaatatataatatataaatatataaatatatataaaaatatatataaatataaaaatatacataaatataaataaatatatacatatatacatataaatataaaaatatataaaatatatataaatatatataaatatataaatatatgtaaatatatgaatatataaatatatgtaaagatataaatatataactatatataaatatataaatatataactataaatatataaatataaatatataaaaatgtataaatatatatatctataaatatataaatatatatagctatatataaatatataaaaatatataaacatataaatatataaatatataaaaatatataaacataaatatataaatgaataagtaaatatacataaatatatataaatatatataaataaataaatatataaatatataaataaatatatatgaatataaataaatatatataaatatataataatacatataagtatatataaatatataataaatatatataaatatataataatatatataaatatataatcatatataaatataaataaatatataaatatatataaatataaataaatatatataaatataaatatatataaatatataaatatacataaatataaatatataaatatataaatatatataaatataaatatataaatatatataaatataaatatataaatatatataaacatatataaatatatgtataaatatatacacagactttttttttttttgagaaggtgactcacttggttacccaggctggagttcagtggcacaatggtagttcactgcatcctcaacctcctgggctcaagtgattctcccacctcagcctcccaagtatctgggattacaggtgcatgccaccatgcccagctatttttttttaattttgtagagatgggggtggggtgtcactatcttgcccaggctggtctagaactcttggcctcaagacatcctcctgcctctgcctcccaaaatgctgggattataggcatgagccaccacactggccagccagagaaattaagaaagtcctgcactagccgtgagaaacaaagtcggaatagtttgacttattttgcaggggaagaaagaaaccaaaacaactgctgagggcccagcatgttccaggtatctggtgtttgccttctttcttaatcttcaccaccactctgttttatagataggaagctaagggtgaacaagggaaagggcttgcccaagaccacagtgtgacagagaggcatgcaccctctgataaatggcctcttctgatgttctctcagctgtctgacttctgggcagccagcggagatttccatccttgaccacaaccttttcataattgcacagaatgtaaagtgatgggcactgttgcccagaggttgcatcctggctcctcagggctgtctgctctggttagcctgcatggtcagtgtggttccttctggtagtgtgatggcattggtgccctctcccaaccctctttccccataactccactccctatttcttcccataggtgggctctcgctcctgcacctgcttggctcatgtgagcattggccttgtgacccctgcctagtgctctatccactcacacgtgggttttctcatgaaatccttgtcataagtcccatttattcagataaagcagctgaggcccggagaggttcagcaacttgcctaaagtcacaaagctgagactcaaacctaggtctcagggtttcagacacccaagccaacaatctttccctgatctgcacatacccactgtgtgagctcttaaagccccacctcgactccctttatcaggactaaggcctaatggccaaattggaaaaagagtcacctacaattgactcagctagccagctcacagggctgcagaactgtactcatctgctaacagccctataacaatatcctctatgaaacactttgtgtgttttcttgtacctttccaattaccagaggttgattttgctctacccattttacagaggaagaaactgaggtgcatggacttgcctaaggtcacattaccactaagtggtagattcaggatgcaaacccagacttacctggctcccaagtccaccagctttgtaccatatttggcagctgccctttgggcccgtggctagggtacaaatgagagtggttcccagcaccttgcatttgccttgttgaggtacatgtttccctctttacacagacactttgtatctgttacaaagccaaggaaaagatctgaacagaccctaagcagcacattccatactcttgctgaaatgacccccttggaagggatgtgcagcctgctttgtcctaggggtggtctcgcttcccctccctcttatcttcctagtgcatggctctccagaaaaaccatgttgccttcccttcttcctccaggctggtaacactaagttgggaagggctgaattcagatcctcactcatgtccctctgccctgaacctcagcagctgtggataatatgtattgacagtttggaggctgattcaacctgttaactttggggggcatcacatgcctctcttcttgctccagaccctatgcaacacctcaaaaccggaaggcaaagccatcagttctgggctcaaaacttcatttcaaccacgcccaaagaccatgactgatgtgctccctcagggctatgagattctgtcctgacactgctgtgctccaaggaaagctgtaacgaatgagcatgaaatatgtggaggccaaggatgggaaggcttcaagtggcccggtgaaagcctctcttctgaaactgcatctggtcagggatgagagcaccttttctgaggctgagctttcagtcaagccttctggcttcaagggtgcagacccaacatgaaccttcggagatgccaattcatttactcttggcaaaaccgggcttcctctctcaatacaaatgaaagcatggaaggcttgtaaaattgactccaaatgcattgtgcatatctacaaacccttaaaacccaacatttggatgagctgctaggagatggatcagaaacacatggagtggattttctgtaaattgcactgtgcgcctctgaaattaaagggaaagagcttggcatggtccatttgggagtcacagatcttccagcacttgaagcatcagtgaatgttccccaggcagaagattctttggctcacttccacaggctctcattttcctcccagcagaacctgttaaagggggaaaggaaatgagaaatagaagaggaagcgagagggtattgagaaggccttcaggaagatgggctgcgaacttggggattgtaaagcatgtggacaatttgggaagtgtgggatgaagccggttcttaaaatctgtatctgtaaccaggttctcttggcttctccctcagtgattcaggcagagatttttctgggctggccatggaccttgcaaatgagtatgcacatcatttagaaactattcacatcctggagtggccagagcatgtagagtgattagaatcatgcagaccatttccatgaagcctggtgacacataggtcatactgtcatatgctattattctgctggtgtttgaaggcatgatctgttattttccacctgcttacttttaaaacaaagccctgttgactaagtgcattctattttgaatacttcaaatgaatgatactttgagaccaagtcaactgttgacattcagccaagactataacccatatgttcaaagttaatgaccatctggcctagaaaaggccagaaggatcacgcgatgtgtggaaagcacattgcagacaatctctgactttccaaagcacttacagacccacccaagaactgacagcccctcaccgaggccgccaccacgtgagccaccctgctgtgcaataacctgtctacatgtcagtccccagcaccgggcactgagtcccatcagaataatctcattcttgtttgttgttgggtggggatcaatgcagagcaatgggcagggcatgtgtttaggcatcagactgacctagcatttaatctcagctcagtcaggcttccagctctgggagagtccaccactccttgttttcctaccctgctctttgccacatgcggccccatcagaggtctaggtttacacaccttggttgagcctgtgggtttaaaaatcagagttctcactttgtctatcccagccaaacatctgcagcacgaaagctgctctgtgcactgaaagtgacatgaaatttatctcacgttacccttttccaggaccgtatcagtaggagggtggggctgtcagggacagatgcacaggcactggggaccttggaacaggggctcgtgggcgttagacatgaatctccagaataagtaggttcctggcatctgttctgcctagctccgcaccacccactgctcctgggcacggcttcagcaggtgggaggtgtctccccctgcccacaggggtatcccttgcatggagagacagagaggtaattacagaaaaactgaaatgcacattggcattagcagagttgcggggcagttcccttctgaaacgcattcattcctgtactttctgctttataataaacacatagccctttggaaattagaacaaagggactaaaggtctaaacaaggacaatgtagtacacaaaacaatgagacataggaagggacagacgtaagatatgacagcagagtgagggatttgcctctgctgacgtcaggagaggcttaggaaagaaaagaggatgatcatagcttctcaggcagccaggaggaaaatgcttcctggcaggcacctggacaccaggagcgtagtctccacgcacgagacagggcggcatgggctgggaactaggattagctcagggttgctgaaatgccaagggaggcagggcaggaagtgaggaagaagagatcagggcctcattgtagaagtcatatgtgccagcttcaatttgtatcccgaagggagtaataaaaggtaattaagccagggcctgacccaaggggctgcatttgcatttgaaaatttcttcagtgcatgtggaaggtgtttggagacaggcagggctaggatcaagagacaaagccaattagggtctatttttcacctgcttatgaaggctatcagtaagacagccaattttgctaagggtctgagcaagaaggaattgcggatgcagccgccagctgacatctgccccctaaggctctgcatagtccctcttcccacagtggggaagggggcccagtgggggttccctgggccatcaatcttcattaagtccgtcattgtcctcaagagccgggcagtgcttggaagggctgcttgatggaagtactgtgaccccaaagtatttagaaataaaggctaattgaccataggaaaatcaaacagataccatcactggtgtttcagcttctgggctcttggacacgtctcccagtcacacttctacctcatccccaacaatggagatgcctgcgaggcactcgccgaccctcccagcagtggaactacccagggacatgatgaatggctcctcactgggcactttggagacagggtgggagtagcaagtgggacagaagtcagctcaaacgtcaggcagagcaggccctttgctgtcactccagcccagcctgacgcactgtcccatcattgtggagaaatttttactgagatataatggacaaatgaaaattgtatatatttatcatgtatgacttggcgttgatgtacatatacactgtgaaataatctctacaatcaagttaatatattcattactttatatagttaccatttccttccttccttccttcccttccttccttccttccctccctccctcccttcttcccttccttccttttctctctctctctctccccctctctctttctctctctctctctctctctgtatctttcttggagtgagaatacttaagatcgaccctcagcaaatttcaagcacaactatgctttcttatcagagtaaaaatcctactgctggaaggaattcaatggcagaaccatgtttgtgttgtattattctcagctggatatttgataggatttaattggtacagaaattgaccattagcaatgtgctttcccacacatcattaagtaaattttcagtgggctgggactggtggttcagaggtgaagacctgcctctaagcagctaatggtcactctcagtgtgtgtgcatgttgtgtgtgcctgtgagtatgtctgtgtgctgtgtgtgattctgtgtatgtgcatgtgggaagtgctttaaagaacaagagccaccaaggaaacccagggtttctaaggaaaacacagcacggggagggatagagagcatagatagggtcagctaactaggtgaagacttttaaaataccaggcttgcaattggccaccctctctctatgtcctcacatggcagaaagagagagggagggatggtgtctcattcccttttattaggactccagttctatcgggtcaaggctccaaccttataacctcatttcaccctcaccagacatggaaccctgtcagaaccttcgtcttagacgttgcagcctccaggctgtgagaaaggagatttctgttgctacagtcactctgcttgtgatgttttgttgtggcagcccgtgactaatgcaagcaccctccaaccgagtacatagcacacccaggccattaaaaggcatcacaaccagggggtgggcttttctcttgaacccctcacttaccctcattaactgtatagacatagtctcatggggtttgagaaagggaatcctgtcattaaaaagatgactttctgttccctgcaaatttaatcgaaagatacatgatccaaacgttgtcctgtttcttggttgacacactgtgggtcagggttttccaagccaatgttttccacatacagccagaggacttaacacacagactaatgttcacctttccaccacttggggtaacataatgattgtgttggtttgttgatgaatttcattgcattccaattacctttaatgtattcatgtaacttgtttatgaacaaagctacataaggtcaacaaagagttttgtttttgaatcatgggctaaacttgcaaaagtgaaccatgagccaggaggaattatctcttgacagaataggaccttaaatgtttccagcagtgatactggttcaaaatcattgactggctctatctgtctgtctgtctgtctgtctatctatctatctatatctaccatctatcaatctgcctacctatctttgatgttccctaaatttcttatgattaaaaaaacacagaaatgaaaaatttcataacagcagtgagactaggaagagaatatatcagcatagggctgtgcctgactctttaatcataatcatatttaatcataatttattcataaataggaccgtacaaccaaagatattcagattcttgagggaaacatctacaaacctaaatacgctgttaataaaccctgtctgcagcccctcctcactctccccccgcaccgaggtggactaaggggctccagtttgcaactgtgggtgttcaggggtgggttggattgctcagacatttgccatttgaggtttgggattctgctcagccacttaccatttatccttctcctttttagcttacaacattttgttgatattaactactctcctgtctccttttttaaaaaaagcttgtgcttttaaaaatcactttactgccatttcagtggggcttggtgagggagcagagaaaatgaacatgttcagttatctctagatctgtaaaaatacactttcttctcactcttctaagaaaaatgacttgaggatgtactacaaaacaacaaagaagggatttattcctaaagagaaaatgtgtgctttccacaaaatgaagatgcaaacggtgctcagcactgggagaatctaaggacagcagctatgtggcacatctagaaaccaactggttcaaccagaaagtccctagaagaacgtttgaagacaaatgtggaattttcacaacacatattttgatttaggatccagacaatctttgtgataaggtgaatacaaaatattatttttaatgctaaaatatatacaatagacagtctaggaaagaaacataaaatcaaagctcaacatgaagaacattaaaatggtgcatgatttaggacaaatttaggctgtaaaaaaagagaatctttttgacatgtaaccattacatttgggtagcactggtttagtgacaaaaacttctatccctcttctatgatcctaatccattctactgaaatattacacaacaatattgtaaaagtagcttatttttatttttagaatttacctacaaagtacaggagactaattattatctcttataaaatctaatggaacttcccccccaacattttagcctccttgaaaatgggacgtactgtgtaaccaataaagtaccattgacggcattttcttagtttaatgaaacatacaacaattatgtggcatgttagatttgataaaatacaatataccgacaaaggagaatgaaaatattataaaccttacagtttgagataagaacagaactgacagatgatgagatggagagggaagaggaagagcaggaaaacaaaggttttaattcctttaacgtacatggagagtcaaagggtgccctgtaaatagagatcaagaaatagctttgacatattttgaagtcataaaaataaaacaaaagaactaaaagagaaaataatcacacatatataaataaagtttaggctgagtaaaatttgatgtatgtaatttaattttttttttaacggagaggagccaagagacactgttgaaagttggcagatcaagaactagggccctgaacatattatttagagctatgaaaaccatggcccgaaaaagtaaaagcagaaactttggaaagttattacccttggcaagaagggtgggagggaaagggagggttttattctatagttacagcattgtttggatttttactactaagggtattactgttaaaaaattaattaattcattcagaatggagcaattcccacaaattaagaaaaacaaaaaaatgcactcaagtaatattttctagaacttacaattaccacttctctaacacttatttgttaattatcttatactattcacagctaaggtggctacataattgcctggtatggagaatgtaggtaatatgaatacatgcatcttcttttaggtggatgatgaagtgtgccatctctatctagttgtgcatcaaacagctaagcattgtagttctgtgttgcttcaaagtaagaccaactagtctcaaattcaagttatggttttgtagacaatcctcatcccaagaggtttacaaacaaagatttgtttaaataaatcatttcactaaaaatttgctttctcaagttcaaatgtgaggtgctttctggagattctttttgattgggatacttaactgatttcacttactctgaacattcccaagactaaaacgattgtgttcttttagtaaggagtgcaaatgttagagctctggtcatccatcatagtttgtgttttctggtggatccaaaatcattttctgctgtgggaagttagggagcctgaacggagggactggatgaagccacagcagaagaacataaattgtgaagatttcatggacatttaatagttcctcaaattaatacttttataatttcttaagccggtctttactgcaatctctgaatataaattgtgaagatttcatggacacttatcactaccccaatcaatacccttgtgatttcttatgcctgcctttactttaatctcttaatccctgaggaggatgtatgtcacctcaggaccctgtgaagattgcgttaactgcacaaattgtttgtagagcatgtgtgtttgaacaatatgaaatctgggcaccttgaaaaaagaccaggataacagcaatgttcagggaacaagggagataaccttaaactttggctgcctgtgagccaggcagaacagagccatatttctcttctttcaaaagcaaataggagaaatatcattgaattctttttctcagcaaggaacatccctgagaaagagaatgcgtccctaaggggaggcctctcaaatggccgctctggggacagctgtcttttacggttgtagataggggatgaaataagcccgggtctcagtagtgctcccagccttattaggatgaggaaattcccgcctaataaattttggtcagactggttgtctgctctcaaaccctgtctcctgataagatgttatcaatgacaatgcgtgcccaaaacttcactggcaattttaatttcgccctggtcctgtggtcctgtgagctcaccctgcctccatttgccttgtgatattctattaccttgtgaagcacatgatctctgtgaaccacaccctattggtacactccttcccctttggaaaatcaataataaaaacttgctggttttatggctcagggggcatcacagaacctgccgacatgtgatgtctcccccggacaaccagctttaaaatttctctcttttgtactctgtccctttatttctcagaccagctgacacttagggaaaacagaaaagaacctaagtgaaatatcgggggagaatttcccccaataattttctacagatgattgtggaacacataaacacacacagccctgagcaaggactcaggcctaagtcattgttaggcatcttggtttcctcaggaggcaatcaacacttcctccactcaacttcttgccaaagcttatggatctgcatttaatcagcaacagagaacagctgcccatcctgtagctgttggagaggacagccttcaatttgttgacatgtgatagggatgatttctttaaagttcatcagctatttcacacttcccagtattgtgaaaccaacatctatatcaagtcagttcagcaagcagtcggggacctggagtgcacagagaatcactttcactagttgcttgatgctgtttttccaagctgagagattaccttatggaagaaattgatagaattaccctgggacttcattcataatcttacatcacaatctctgtacaaagaccaccaggtgaaaacatttgaaatttactcttggtgaatttgaaatgtgtaatacattattatttattatgtttactatgctcaccacaaaaatgatggttgaggtgatggatacagtaattagcttgatttaattattttacattgtacagttgagacttgaacaacatgggggttaggggtacaaacccccaggcagtggaaattctgtgtataatttttgaccccccccaaaatttaactactaatagcctactcctgatctgaagctttactgatatcataaacaattgattaacacatactttgtgttttatgtatcatgtactgcatccttagactaaattagagaaaagaaaatgttataaagaaaatcatatggaagagaaaatatatttactattcattaaatggaagtgggtcatcagaaaggtcttcatccttgtcatcttcatgttgagtaggttgaggagaaggaaggggaagggttggctatactttctcaaagtggcagagacagaaggaaatttgcatataagtggacccatgcagttcaaacccacgttgttcaacagtcaacagtatttataaatcataacatcactttgtactccataagtatatacaaatgtaatttgtcaatttataattaaatgaataaaatttaaaaaataagactacaaggcttattttccacctcatcctggtaccaagaacagttgagattcttgtggggacctggtctgcttcatcctatgccctccatgaaccgcagagcatgcagagtcccgttctcatgcgggtaagaatccttagagataaaaatgttctggctgggtgcagtggcttacgcctgtaatcccagcactttgggagtccaaagcaggtggatcataaagtcagcagttcaagaccagcctggccaagatgttgaaaccctgcctctactaaaaatacaaaaatattagccaggtgtggtgtcgggtgcctgtaatcccaggtactcgggaggctgaggcagagaattgcttgaacctgggaagcagaggttgcagtgagccgagatggtgccaccggcactctagcctgggcagcagagcaacacttcatctcaaaaaaaaaaaaagttctttaccctcagaaaatgaaaattatggtacgtggtttttagttattactgaatacattttctgttttctcttatacttaccttccttcttttattcttctgccactttattctattttatgtatctataagtcaccttcaccttattgtaataaggacccataaataactaaccctcacaccaaatccttaaggtaggtgtccttgtttctacttcacaggtaagaaaactgagactgaaaataagtcaagaaggtgccactgaaaccattgctctctgatcccaaagtccattgctctcagcaccctttcctgttacagaagaaccactgtaaaattcttaggagcaatattgctttctagagactgcaaggaaattaataatgcaacgaatgttatatattgtaaacaatgtttgtttataagactaaagctaagttacaaacctggtaactaactatatgtgaccaaaatccaggcatgacagttcacaggccagttgttcatccccaccacagcttaatagagctgcgctgtccttcctggtgaggtttcctccaagccaaacatgctttgagctggctcagatgcccaggggcagaagcatgggcttccttcagagaaagtaatgcttctgtgtccagaattggttccttccagttgattttagtctcactgacttcaagaatgaacaggcagaccctcatagtgactgttatagttcttaaagatggtgtccagaatttgttccttaagatgttcagatgtgtccagagtttcttccttctggtgggttcgtggtcttgcttacttcaggagtgaaggcacagaccgttgccgtgagtgttacagctttttttttttttttttttgagacagagcctcgctctgtcacccaggctggagtgcagtgatgcaatcccagctcactgcaagctccacctcccgggttcatgccattctactgcctcagcctccgagtagctgggactacaggcgcctgccaccactcctggctaatttttcttatttttagcagagacacgatttcaccatgttggccaggatggtctggatctcctgaacttgtgatccgcccacctcagcccccccaaaatgcagggattacaggcgtgagccaccacacccggccagtgttacagctcttaaaggtggcgtgtctggagttattcattcctcccggtaggatcgtggtcttgatgggttcatggtctctgtggcttcatgagtgaagctgcacaccttggcagtattacagctcacaaacatagcacagttcccaacactaagcagaatcaagatttattgtgaagaccaaaagaacacagcttccacaaactcgaaacagaccctacagggttgctgcagttgggccggtggccagcttttattcccttatttggccccgcccatatcctgctgattggtccatttttacagagtgctgattggtccattttacagagtgctgatttgtccatttttacagagtgccgattggtgcatttacaaaacttaagctagacacagagcactgattggtgtgtttataatcctttagcaagacagaaaagttctccaagtccccacccgacccagaagaccagctggcttcacctctcacttccatgctgccaagacccctaagactcccagagcctccttcctcggctcctcactgccccttcccgccctactccatgcctccatgttttccccaggacccaaggccagacttcgctctgagctccctgacgctttgggctgaggccaggccctgatataccggtactgcaggaaaagaaaggaaaagaatccagaaggctcctcctgggcttgcacaaattcccctctgcttggtctgaagaggcacgtactaggagagtgcacaggtaacagtgaagcccccttacccagtgacccttcctcctggttaccacattccccagtggcgcctggtctatgacagctgtgtctctgcctccacagggctcagggcaggtcctggggcacttctcccgctggccctggatgagtcagcacctcaggcgcatgcagtaggtgctcaagactcagatccctcctcttgtctaggcctccagttggcccggattctgggggccctaggggaccccctccctccccttctggcttttgctcacacacactggacctgataaaagttccagcatgatttatcaaacaccctggctcctccaggctgagcccctgggggattttgaaaggaaacaggctccatgtgcttccaatccactccacgcagctcattgcgctattgttccgtctagcgggggatgtgcgggacaccctggaaccgttcgtggctctgtttaaagatgtttttcttagaagcaggaagttacgtcctgccaagaagaaatgaaaataaagccccgagggttcactcggggttcgctgggagccgcgctgagctgttgcagcgtcttggcccggccgaggaggaagtttaaaggggcctctgtctagagctctgaaggcaggcaaggcagcctggcagtgaccatcaggcaagtcagagacacacgcgagctctctgccccaggggccctagggtggcctcacagggcacagcagagccctccttctcgtgatcacgctgcggtcgggttggctgctccttcccattcgttcctctgaatctctgcagaggccgggggcatgtgggaagggcccaggaaaacctcaggtccaaatcttggctccttgtatgatagacgtgtatcttgcacaaagtacttcacctctctgggcagcagatgtcgtgctgtgaactctggggctgctcttccccctgccccaggctttcttacatacttcctactaacccccagcctccgaggaccaggttcagacaaaactgtctatcaaagtcattccctgggtgagtgtgactgaacaaaatcaacagcccagcccggtaatgccaagaggctccaggcctcccacagagggaggggctcctccaaggctgtgggtacaggtgttcttctggggttcccagggcaagccgggaaggagtactgcagagccccacggaaggatgcatgagcacaattgctctttcttgcctctgaggaaacttcttggcagacagtgtagaattcatttctacctcttttcattcattcaacaagtactgagagccttccatttgcttaataagaaaaaggggctaggactttgaaagccaaaactgtttctgtcatttactgactttgagatcttggaaaactatgtataagtctcagtcttctaactatagaatgggaataaatgtctctaccttttaggtccttgtaaagatcaagcactcttggatgtcccctgcactgcagggaaacgtggctgctgcctcttctggttgcctgcagctctttgcatagagttcatgttagccttggtgattcatgagtgcgtgattgtcaccaacacgtgtttctgagtgctgcagggtgggggctgcactttatgcctcaagctgtccccagattctggaagagtcccctgctcacttgagggtgggttgaatgaataacaaactgatttatttcctccatcatgtcctgagaggatacctgggctgcaaaaataaacatgcctgaggtctaccagatctgggcagcatggtgggacagagggacaactgaaggctgatgtcgtggtcacctcccagccagttgaagggctgctggggcactgacggtagacaagacatctgaagccagttagtaagactccagggcttacgaatactgcccagttcctgaaagtggcgtcctgcaggcaaggagagcacactgtccaagtcatagttggaggcacattgaaggcaccagcaccatctggccctctaccccagaacttggaaccagcgggaatcacaggactataggtttcagctcaaccaaagaaaggagttctcaacaatcagaactgtctgactatagaatgagctgccgaggtgttgagtttcccagccctgagggtttttatgtaaggcacccacagctatattctaggaatgtcttattggtgtggtgagtcatgaaccactggaggcttgattgcgttccaaagtgtggcacatacacgattggtggtccatgcgctgattttataaagcacacagaccatttttttaaaaagtgtgttttctttctgttaaattatatagattttgtagttattccctattttatgagaagtgataactgtttttcatttatggaacaacaaagttttattttaaacaaatatatcaaatacaataccatttataattgctcaaaaataagatacttagatgtgaatctaacaaaatatgcataggacttgcatgctgaaaattacaaatagtgattaaagaaatcaaacaagatctaagcaaatggaaagacataccataggctggaagatgcagtgaactgaagatgtcagttctccccaaattgacacacaggtttgatgcaattctatcaaaaccttagcaagatttatatttttttggcaggggaaaattattctaaaatttcaatgaaaaggcacaaaaacttgaataactaaatcaaaaaatttaaagaacaatcaagtgagaagaatcagtctatctgatttcaaaacttattgtatacctatagtaactgaggttgtgtggtattggtggaaggctagacacatagatagatcaatacaataggataaataaccaagaaacagatccagaaaaatatgcttatctaatctttgacagaaatgtggaagtaattcattgcagaaaagagccttttaaataaatggtgctaaagtaattagatattcataggcaaaaaaaaaaaaaaaaaaagccaaaaaccctcaacctaagtcttacaccctttgcaaaaattaactcaaaatacatcatgggccaggcacagtggctcacgcctgtaatcccagcactttgggaggctgaggcgggtagatcacctaaggtcaggagttcgagaccagcctggccaacatggtgaaaccccgtctctactaaaatacaaaaattaggtgggcatggtggcacgtgcctgtaatcccagctactcaagaggctgaggtgagcatcacttgaacccgggacgtggaggttgaagtgaacctaaatcacggctctgcactccagcatgggcgacagagcgagactccctctaaaaaaataaaaataaataaataaataatggacttaaatataaaacatgaaactataagacttaaaagaaaatagaaggaaatcatcaggatatgggatgagataaaggattcttagacttgataccaaaagcacaacccataaattgaaaaattgataaattggacttcttaaatataaaaacttttgctctacaaaaagcctattgataacttttttaaaagccacagactgaaagaaaatgtttgcaaacatcacgtatgacaacatcatagtatctagaatatgtaagaaagtcttaaaattcaatagtaaaaaattcaatcaaatcagaaaatgggaaaaagtcatgagatattttactgaggaagatatacatttatcaaataagcacatcaagagatgttcaaggttattagccattagggaaatgcaaatgaaaaccaccatggtatatcattacacacctatccaaaatggccaaaaaaaaaaaaatagtgaccatacaaatgctggcaagcatctggtgaaacggggtcactcacacattgctgatggaagtataaaacactaccaccactcttgaaaagtgtttgtcaattttttttacaaaaactaaacatccaactaccgtgcaaccaattgcagtcctggacatttttctcagataaaaggaagcaaatcgatacaaaatcttggacacaaatgtgtataatagctttattcttaatagccaaaaactggaagcaacccagatgtctttcaatggtgaataggtagacaatggaataccatcaccaaataccacttagtaatgaaaaggaagtttatttaacttttatgtctaacatgcgacaatctggatgaatctccagagagtgatgatgaatgaagaaagccaatctcaaaaggttattagacataccaaaagattttatttatgtgacattctttaaatgacaaacttacagaaatggggagcaaattagtgttgccaaggataaggggggtctgggagtggtagggaagtgggtgtggccacaaaaggacaataggaaaaactttgtggtgatggaatgttatgtatcttggctgtatcaatgtcaatatcctagtgctaatagtactatagtttggtaagttgttaccattggggaactggggtacaaggatctctaggtattatttcttacaactgcatgtgaaactgcagctatctcaaaataaaaaagcttaactaaaatctaataaatacaccaaaattaaaatgcatctgtgtaaagaaaataaagtaagtaaaatgacagtggcaagtggtatgtggaaatggcaaaacttttgaaggtgtcactccaataactggcacataggaagcactgaccctgaggacccccaggtaggatggtaggggatgtttgaagtttgaaatcctggcttgagttctgccgtccacacacaacagtgtcacgatgctgggcaagtcatttaagtcctttgccctattctcctcactgtgagataagaatgaaaatgaccttgtatgactgcttcacaataccgtcgagagtcaggcaaagaaaagtcattgtgaaaaagcagctatgaatatcaaggtctcttcccaatctgagattttatgaagttgtgttaaattaaagaagtcctgacaacactgtttatgtagttattacattaaaaatgttgtgtgtgggtcccggtggggaccttccctcctcacaccttcccttcctccctccatcctgtcttcgttccacaaatgtatattgaagacctactgcgtgtcagctcctttgctgtaagcatgagctacagagacaaatgaacatattccatactttgaggatctagtatgtagtctggtggggataacagacacaccctaagttgttacatggggaagtcatttccattctaccaaaaccaaaaacataacccctgagtcatactggtggattgatagggatgttgaaagtacatttgaagggctgagaaagaagaagaggagggggccgggcttcctgtctttcattgtccagaagtttccctagacttaattgcatggcaggagggctctaagagcagcaatggggaaagcgagtgaggaagagagtcggtgcttgtgccacttttgctactatcccattagccaaagcaagtcacaggccagcccagatcctagggggttgagagagattccagcactccatgggaggagctgtaagctcagtagccattggtgatctgtcatagaaaacgagcttaataaatataggtgcatctacacagcttgtctgactggagggaggtaggagccttccatgggtccccaggggccatggcccatgttaaggaacatggcctgcaccctgtccaacggaacccacttcctgcttcgtccctctgccagggaagtatattcaatccttggaaaacacagttcacagcgggggcctggatgcgagggatcagcacaagaaactcccaggacagtcagctgagcccattgagggacacatttccccttgtgctctctggtccctcagcatcctgtcctcacctcccccaggggagaggacagtcatctgccacctgcacattttcttaccaatgcccctgcttcttggaaaactccagggcactctagcaccacagtaagaaggtggtgttggaatgcctccctttccaacacatcctaatgctaagatcctggcttcaaacaacaccggcttacaagtagcgctcctcagccagggacataggggcttcctggggcggttgcctggttgctgacgtggctgtggcacagaaagcttctctttctgtaacttatttggagaattgaagagcaggttttgctaaagtcctgttgacagcaacttaagaaactgtgggatgaaggatccaggatgctccctgattctgttagcagcctcccccaaggataccaaaatgtgatctttagacaaacagagcctcattagaacacagacctctgccagagcatcctgctggccagctgaggcccagggagtgctcaactgatacagaccagattgctctggaagtcacaggtcccttgcagggctcgccagcaccggggcagcacgcccagacctagaaaaatcttgatttactaatgtgcccaggcaaggatgcgtcacccttccaacctcactcatagaggtgagctctctgacccaggagcaagcactgggcaattgcaaaaatgttttgttaacataatgggatgtactgtggagagggggtgattaaaagcagatgaggcaggagccagtgatcgggctccacctggggttcattccactctgggcagaggggcctgccaggctggtgtggggaggtctctgaatctccagcaccacctccagattggccagattcatgggaagtgttcccatgtgtggaggaacatgctgagcacaggatagagagttccaatgcggaagttcactgaacatacagatgccccagctgcagattttacatttgttggggtggtgactgccaggtccccctggaaccatcggtggtcacagatgggctgagtcccacccacttaatgaaagacttcctttcagagaactaaaataaagacacctggctgatacctgaccaaagggagcctcttctgctgttctctttacctgataagctgttatttacttctcaaaaccctgtcaccacccttgggccactcctgcaaaaagctgtccctcccagccctgcaggcatcatcacactgcatgtgtcacatggcatcagcacagatgattaaggtgtttctttgcccatctgggcattccctgtggggaggccatgttgattctgtgtacccactgcctaattcaggttctggcataaaataggtgctaactaaacacatttgatctataaatgtgttttgccttgattttataaataaatatttttgccttgattaccttgacttcaaaatagtagtggcaactcctgagcttggcgtacaaaaaaagtctcattgcttctaatatttaaatttaaaaatagcatgtgttcatactccttttttcctccccaggtagcatactccacacacccggggttggatcatccaaagactcttcaaaggctggcccaggccccagggcagaacagttactttcaccagcatctaccatggtgccactctcttctgagcacctctcctgctgttagacactgtttgggaagccctggtcagatgtagaaagttctgggtgcatggcaacagtgattcaggacccgagacagggaggggctccctgacctgcttagtgatgctcagcactggtggatcccccggggaatatgcctggactcccagtgttaaattattcaggtagatggctactttgacttacctacccacacatgcacatggagacacccttacactcacacatgttcccaagacatgcccatggagactagacagcaggtttgtcagcttcacccacatcttctcttggccacctaggtccttagttgggccaggttggccagtccctctctctctgctttcgcggcgcatctgccatcagggactcactcccttgttcgctcttgtcatctttccccaataggatcctccttaatccactccctaacattgagcctcaaagggggagggcttgagattttgacttcttcccagaaatcatgaggaatattggaaaacgtggctttctcaatgcagaacagtaaacatatgctgtaaatgctacaggcgcttgctgacatctggttacgcaaagggtcctggttaacatctagttatcaatgaacatctactccaaggtaatgtgatgttttcactgataaccagcatttaatcttactaaaataatttgaagttaagcctcaatggacaccacttccatacactcataacacacaatcacagagatcattgaacattgcagcatatctgcaaggggctggtgcttatgaacttcaaatcacaaaagacattgcttcattcttgttgtgaagaccattgactacaagaagagaaaaaccaaatgcatgaatatctatttgcctcattatttctgttcaattataacatagggttttagtaggagttttatggtttgaattgcgtcctcctaaaattcatatgctgaagccctaactttcaatgttgctgtatttggaggtaaaatctttggaagaaataaagttaaatgaagtcaaaagggtaggccctaatccaatttgactagtagctttataagacaagggtgagacactgagggtgtgcatacaggcaaaacgccatgtgaggacagcagggaggcagccaccagcaagccacagagagagagagtgtgggagaaaccaaacctgctactgcattcatctcaggcttccaacctccagaactgtgagaaaattaatttctgttctttaagtcactcagtttgtgctattttgttatggcagcttaagcagactaatacaggcataaaacctagacatcttgctcaaagaagatgatgtctgagatgcccggtgaaaaagtaggaggtaaagaaaacagatgcaagggtatttgaggcaggataatgctgtctgatgtttggagtgttttctgccagcttttatgggctcagaggatggtgatggagctaaaatgcaaagagaaagaaaagatcaacacttgatcatcaaatttcaaaatagtcttgtgaaactcattgaagtgacgataaggtggttttaaaaagctattttagggatatatttaagatgttgaaaagctagagctacactcacgaacaaaataagcattgacactgacaagagacagaatgtgaactcacatggcccagggctgaagctgcagaaatggatgctggtcccacaaagccaactgccactggaaacaaggcccaagctcaccctactgttggggagtggtccagagccagcttccctgtgtgaaacccacaagttcattgggcttctgggcacacagacacgaaatcaagcctgggatggttttcctgtggctgcagatggtgatgaacatttccctggggtagcgggagggaaaggtggtatccattcatcctctgggagccatgacaagctgtgctttggcctgggcacaggatcagtgatatctctatgggtgcaaaccgtgggccacaaatatgagagcgttgatagtgcagaaaacccaggggttgggtaaaggcaacagcaaaactaccaggcaggagaagtgaatgaagggacaggaaaaggcaactaaaacaaaaaccaataccactccatgggcacagtaggaaatttgtagcacatgaggaaagctgccactataacaatcatccaacaaacaaaacaaccaaaggattcactcagaggaaatgaagataacatagaccaatccattcactgatcaattcaacgagtgtgttgggaagctacacatttacagtgcccggtactgttgtaggtaccagagatgcatggacaagcagacagaagtccctgcctggatcaggggaaggagatagccaaactgacttatatagtacactaggaattagtaagtgctatagaaaaaaaatgaagcaaagtcaagtcaattcagaatatggggctggggaagaatggcttacaatttaagttggatttaaaaatgaagatgttaagcagttctccaagaaataatgaaagaaatactatcaatcaaaatgccagttgattataaaacaaaaattggtgaatatgaataaaaaaccaggtaatatggaaaaaataataagcccatgaaatgaaaaatataatctttaaaatgaaagactgaaagttcagtagatgagatgaaaataaactggacacagtaaaagacacaattaataaaatggaaaataacattggaaaatttatgcataattccacacagagatatatagcaagcaaagactattaaaaaaattggataaagccaaatgttgattaggatcaaatgttcattaggatataaggatataggaacctcacacatagctagtggaagtaaaagctattagtattctgaaaggcaatcttgcactagttaatttaggtatgttcctggagataggtagatgacatagatggatacagagagagagacagagacagagacagagagagagagatggatagatagatatctgtatagaagtaggaatagggatatctcaaagaaatgttcaccatccagtaagaggacaaatacaagtgggatttatctgtagtgtcaaggagatagagaagattggctgctatcactgggaaatgaattggtaacacttggttggagtacaccaagcattaatatgcagcaattggaagtaatgaacttgatgtgcacacaacaatatgtgtggctcttacaaaatacagtgtgacatatataacatatgattgtttccataaattaaaaatacatgttcagaaaacaatacatgttttaatatcacatatgaacaaaataatacacattaaatacacaggagtggttcttctgtgggagaggggagataaataaatcatggtaaaataaaataaacacatagataaaacaagtgagggaccttgtatacaaggttaatcacacacttcacttcatggcaactggtgatacgatcttggctcactgcaacctttgccttccaggctcaagttattctcatgcctcagcctcctgagtagctgggattacaggtgagtgccaccatgcctggctaatttttatgtttgtagtagagatggggtttcaccgtgtcacccaggctggtctcaaactcctgaccacacgtaatctgcctgcctcagcctcccaaaatgctgagattataggtatgagtcaccatgcccagcccataatgcttttataaagtaaaccccaaaaagattccttgacacactacatgagaacacagtgagaaggtgccatctatgaacctggaaacaggcttttactagacactgaatctgccatagccttgatcttggacttcacagcctccatagctgtgagaaataaatttctgttgtttataagccacccagcctgtaagattttgttatagtagcctaaacagactaagacttctagaaaagaattatacccagactgacagcagacttccaatcagccacaataggggtgaggagaaaatggaaagtcatcttcaaaggagctgtgagtctaaattctgcacccagttaactgtcattccagagtatctgaattaagggcattttcagacatacaagaataagagagtttatacttccactgaaagaactattaaaagataaattttagcaagaaggaaactaaattcagaggagtagaataaaagaagaaatgatgattaaagaaattggtaaactatgttggtagatgcaatgaattcttgatagaaaaaataaatatggaactaaagttatagagcaataacacagataatggagcaggggtgtgtgaagggcatttgaagcatgctaacagcagtgtcatatttggaatgaagacagatatactgaataattttggatactgcttgaaaatataaatgtgattttgtaaagtgaaaatcctagaggacaatccattccacccaattgtaatagaatctccaacttccaaagcaaataataggaaaaaggaagacatctagcattattaatccagcagaaggaagaaaagaaagtagaaaaaggcagcaaaaaaagaaaaaagcacaagaaatggaacacattaaaaagcagaaataatagtaaacctaaatgaattacattatctcactagaaaacacaatcaaattcaatttttaaaattttagtataagctgcctacaaaagagttaaccaaataaaactaaacacaaagtttgaaaataaaagtgtgtgtgctgagggaggggaggggataaaaagaaataatctaagcaaagtctggctctactgcagagttaagataatcaaaaacttgcagacacctagcaacacagcttcgatgtgtatttactgaatgtgtacttataagtacatacatatatatgtgactatgtgtatgtgtctgtgcacacataaccatataaatataggcatatgtgcacagacacatacaatgaattacaaggagaatttgaaaaactaatagctacaatgggagattttaagaatgcttttctcagaagctggttaaggtctagaagaaaataaccttcctcaaagggcaagaaggaaaccctcagctggtggtgtgacatgcacatgctttagagttgccctatagaatctgaccctcttctgatcaccttggactcttcattcatctgcccacccactcacagcaagacatgcttactgagtggccagtcagcatcaggcatggggcaggggatagaggtgagcagttcccagtttctgtcttcaaggagcccacagaccctcaaacagatggtcctattagagacaaccatggcattctggcaggcagagaataagaggattctgggaccctggaaggcttcctggaggaaaaatcatcttaggtaagtctgggagacaggtagggattggctaagtgaggaaggtggatgggattgtaggagagagggatagacccagaggtaagacagagcatggtgtgtcaggaaccttggctgagtatcctagaacatagcaggtggtgggggatgggaggagagcagcaggagaggtggcaactcagtcatgaagacagagaaacaggttgccttgatgaggaatctggactgtatcctgaaggtgatgggccaagaacatgatgggactagtaccagatttcagcaagaccgagatctcagtgttgcagaggggaagagactgcaggccaggtgggagcttttcttatgccatatgaggatattgtgtcattcaagtaatgactcattcaattgttttttcccttcaactttttattagaacttcatgtgctattccttttctctccaccagggaaacgaaaacaatcagacctgctctgttctctgtgggttaatagtttaggtgaggtggttgctgtactatgcaatgaaagctgcaacaaaactgattgcatgcaaggtttctggaatgattgagaatgagctgctgattctgcttgggggaaccagggagggattctttggggaggtggtatatctgttgagttctgaaagatgatgaaggtctcgtggaacacagttggcagaggaactctcacacgaaggcacaaatgcatgaacatgtcaggtcgtgggtgggttataagcgttaaatgatggaggtggtttcatcattcatatttttcatgtgtggaaattgagagctggagagattatgttactcgtcaaaggtcatgatcagacctgaggtctctggactcctagtcattgcttttttactattctgcctacatctctttctttattgttgtcttaattgtattaaaagaaatgataatggaaacatgttttttggaggaacgcatttggggcatgcgtattggtgtatgtgcctaagcgtgtgtgggtgttggtgtaaatttgttgcaaatgagtgtggttctgtgtactccgtgagccagatatccattaatcaacctctaaaaccatgtctttgtgggtgacagatgtttggattcaattataaggatgggaaagttgtttttccttccaaggaaagaaggtattatttgagagtgaaagtcagccatatataacattggtgatgaatattgttcattgtggaaacactctaaaagtggcttgtttaaaagagggtaatacattcagaagcttttaacccaccggatttaattgcaactgagtgccaaaataaaccccctgttaacaaacctccagctttccactgatttctcgcacttgctcccagctgtgagtgaagaatggaagtcagatgcttggattgcttgcagtgtgtataaagaattcacatgtgagtctttggctgctgtacaaacaggaaagtgtcctttcataaaaaggatgttcaggccagggcagagggaacccagggccacgtcgttatctgttgactagctcctgtccgttatacgtaatcaagacttagctaaataaccaccattaactgaactgaatatgaataattttcagttcatctaagactgattaagggtaaatatttttcataagtcatccagaataatataatccactattgctccaaagttgtcccaaagggcttcactttggttcaactcaatacaagtacattttgttcatttgaacagatattaaacaatacctaatagatgccagacagtacgagtatcccagtgctcctcctcagagagaattgtcaagaatcgggacaggcaaatgtagcaaaatcttttgttgccaactttgattcattaattaattgaaattttaaacactaaaagtagacaaaaaaagaaaaaaagagagggaagggaagcagtcagttgtcactgtcctgcccatggcccacaggggctgctatcttgagggtggcattcaacactctctgtggtccattccccggcccttgtgcaacttccctgctatctctcatctctgccatcttctaaccctccaattatacacagtatgtgtctttgtgaatgtcacttctcctgcctagaagctcacacatttgtcttcctcaatgaagcaccttcaacacacaggaaaatgtgacctttggataatcactattgccttcccagtacttagcacagatgctcaataaatattagctgaaggaatgaatgttcatatcatatatcctgtgggctctagggtcattatgatatccaaaaagtaaacatcaactatataggttttatattcaaaatcagcatacatctgtaagactaagaacatgcacaagaagagagcactagtgtgtctttattatcagctacaatagatgtcaagtccttcctcgcctgcatgctctagcaattgtgtgaggtggatgttttgtctccatggtacaaagcaagctaaggaagttcactaacttaatcagaattacccaacaaaaaaatggtgagatggagaattgatcctacagccatctgcctgattcaaccataccaccctgcatctgcatctggttggcagacccagtcatgctcattcctcggggcctgtctgccatgtgggagcagatgggaccctaccatgctctcagtgttggggtcattgctttcctcatgggggctcatactgtgagtgagcatcacgtggtgtacttgatgctgtggctgagatgaccttccagaaacccataaaaggtgcttggctgcccacgtgttttcagcccttctccagtttgaacagtcaagggtggtggtaggggggtcatatgtcatacacagatgctctgctggctctcctgggtgacttggggtgctctcacagggtcatcctgaggcctcatgcagacctaaaaaatctagcccaacccaaccagatgcctacatttctccctttggtggctgcagtagctgtctctctaccggttctcctcctgcttctctggctggtgcttctcagtctcctttgctgattgttcttgttctgcccacagctcaattgctggtcatcccaaggattctatgtactcaatgccatagatgctggggatacaaaaacaaatggtaccagggagactgttcattttcttcaacaagctgtggtcctatagaggaaaaggtaatgcaagattagattgtcctagagactctaatgggaaccgaatgtgttctgattgggacatagaggagagtcataactggagcctggaaccttttctgtagagcgagaagagaacagtggagctgagtaataagagatgagcaggttttaacagtagaggggacatgaggaaagcagagggcaatttatgcaggtgcagacagcactaggaaatgtgtggatgtctgaacagtttgtcaggtcaggggaactgtgagtagctcccagtgcctagagcattgggtgcaaaatgggtgtcgtggatgttggaagaaggctagagcagtcagcctggtctggatttggaagatccaagggtcctagcctttcccttgaagttagaagacatccactgaaggaattttacaaggggggaatctgatcctgtttgtgttttaggaatattattcatgatctgaagaggacatgcctatgggtttgggtaagagagaaaagagaaaggcaagattggaagcaggaagatccgtgaggagttgttgcttcagtggagggtgaagatgaggacgccttgaaccaaggaggaccagtggaaactgacgggtggcattttggatgagatgatccagaggtagaatccacagggcttcatctgaaattgagtcaaaaaatgaagtgaatgagaagaagtagcccagttaactactctgtccactttatttctggattggacatccgaaagaagggtattgggtttttttgttttgttttgttttgccatttaaaaaaaaaaaactcttagatatgcagaaaagtttcaaatatagtacagagcattcccatctatcccacacccagatttgtctgttccatctaatgaaccaatattgatgcattatctttaactcaagtctataccttgttcagatttccttagtttttgcccagtgtcctttttctgtttcagtattgcattcaggattcatgacctttagttgtcacatctctttaggctcctcttggctgtgatggtttctcagacttgaaaagtaccaatcacacatttgtttatttttcctttcaggtctatcattttttgcttcatgtgttatggtgctctattgtttgaacattaaacatttaggattgctatgtcttcttggttgatttactatataatatccctcctgtctctagtaattttcttagctttgaaatctatctgatcttaatatagcttctcctgctttgtttaatgtttgcctgctatatggtttccgtccttttattttcagcccatctacagtgttatgttgaaggcaagttttctgtaaatagcatatagttgagtagtgctttgtaatccactatgccagtatctgtcttttaattgatatatttagacccatttgtatttcatgaagtggttgatattttaggctttacatctgcctttttaatttttttgttttctgttttgcatttcttagttttattttgttcctgcctacctatgggctacttaagcagttttagagttatattttgattatatttagttttttgtgtatcattttgtgtagcttttcttagtggttgctctaagtattactagatgtatatagatatgtatacatatacacacataacttatcacaatgtacttaatgtcatcctaccagtttgcataaagtatagaaaaaataccttcttttaatttatctctcttttcttaatatagatgtcttatatattttctctgcatacattcagagccacatcagacagtgatataatttttgctttaatcggccaaaataatttagaaaactcaagaggaaaaggaaagtcaattgtatttgctaacatttttgcttatcatgttccttcttcctttcttatgttccaagatcctttcttttattattttatttctgttcagagaactttcttcaactagtcttttaggatatatctgctgtcaataaattctctatttgtttttgtctgagaatatctttatttctccttcatttctgaaggatattttcacttctgaagtatattatcacttatatgtggaattccaggttgaaaatttttttccttcaacacttgaaaaatgtaatgtcacttccttctggtctcaatggtttctgatgagaaatccatggtcattccaattgtttttcccctgtatctcaggtgttatctctccttgactgctttcaattttctttgtctttggttttcaaaaggctgactatgatgtgctttgatatggatttctatggctcatcctgctgaggtcacttagctttaaaaatctgtagatttgtgtcttttaccaaatttgagaagttttgggacattctatctttgagtacttttccagcgctattcttttcctcctcttcttctacaactccaacaacacaaatgttagatcttttgttatagtcccacaggtgcttcaggctttgctatttttgcttagtctattttctctctgttgttcaaattgggcctaggcagagtcctcaggaggcccaaccattaaactgtgggcagaataagaaaagccatagaggaaactgggaaatagcagccagaaaagcaggaagagaaccagtagagagatgctgcagaaactaaaaggaagatacttcaagaaaagggcagttggcagggctggataccagagaggccagagaggtgagaactgaacagagcctttgggatttgacatgaagcagtcattgtaagggcaaaagattgattgctatgacttaaaggctgaacaaaataaaaggagttattacttctattttacagactagaaaactgaggtttgggaagattatctaggtaatgtatccaatgtcattcagctagtaaaatgactcaacagggacataaatccagatcttccaaagccaaggccaggcttttcctctatagtgctggaagaaaaggaaagagtcagtgatgaatcagcccatccctagggtgaccagggatccaagataattccagtttgtgccattattttgatatacctattggcattgagatacagatagagaaacatagatatctggatctccttttttttttctctctctctgttcctctctctgtctctgtttttctgtctttctctgtctctcttccaccttcacttcgctctcaaactgccccaggttgaaggataaattacatggtcacactggtcactactcatcacccacctcccagtttgacctctagcagtatattgtctggacatccccatgcctgtctcaccgtttataaaccacctcaaatttagtggtgcaaaacaaaagtcaatttattatagtcatggatgttgtgggtcaataatttgaatgacatggaggggatggtttgtctctgctctctggcatctgggactcagctggaggctagaatcttcagatgacttcagtcatctctctgcctgagctgagaatactgcaagtctggacttagccagatgtctgttgactgccactctcttgggtgtggactcatggcatggcagctgagttgcaagaggaagtatcccacaagagaacaaacaaagtctcttctgacccaaccggaatcacgcagcctcacttccactgcattctattagttacaagcgagtggctacagcctgccaagattcacaatggaggggcctggcctccccatcctgtggggagagtggcaaagtctcattgcagaagaacatgtgggaaggagatgctgctggtgcaatctttggaaaatgcactcagccacaatggcccactcctttctgctcccagactggagcagaaaataaagagggagccaaggagtctggctagcatgaactgtagaccaacctcaaaaggaccttgctgtcaggtgtacaagcatcttaacagcaaaactatcatggggcaggtcagaaatgcagttatgtgaaggcacccaaagcgagcttccccacctgactgctccaaatctgctctgtagtgctggagcaatgagcacacagtgtctgctaaggtttgaatgtgtcccccaaaagcatgtgttgggcacttaatccccaatgcatcagtgttgggaggtggggcttactgcaaggtatttaggccatgagagctgtgccctcataaaaggattaatgctgattataaaaaaggcttgatgctgtgaatttgatcttttgttctctctcaccctctcttttcccttctgccatgctatgacagagcaagagggccctcacaagatgccaggccatcaatcttagacttcccagcctccagaaccatgatccaataaatgtttattatatattacccagtcttgggaattctgttttacagcataaaaaggaataagatagtgtcccagggaggactcttctctggaaagtgaattcatttcatggaaaacattttaaagcatataaagttaacttgcaatttggcaaacatgtagcaagtcacctgattaaagcagacacttactcagtgtggataagacagtattacacagcaggctctgtgggcattgctcattcagggacatcaccactgccttgtgggggaggaaatggaaactttgtcactcacccaggtatcatgctagggatggcagagctggactgtgaaccagggccgtccatgcacaaccgtcactcttctggttaactcctgctgtttcccagaaaaaaaaaaaaaaaacagctgtgtagactcgggggcctgtggggcggcagtgggtttctgggtgtctccaacccacatgtgtgtatgctggtggcgggggcttagtgtgaatgtgcacacaggtcccatagcctttcctcatttcaaaagccccatcacacaatcagcacattcaaagagaaaacacattttgggcttcagcagggacttcaaagggctttacaaagctctcttacttggtttataggtctccaaggcttcaagtgtttttggtttttttgcaccaagtggtgaagaatgtaattaaatgtgaacattaaaatgtcagctagtaattaacaaagaaaaagggcctgtgttgcctgccaggggtcctcctccattaggcaggcaggcccaagccagcaagcggggcatggccagcaggagcccaggcaagacctggacctcccaactaccactccagccccagaggaggggatgtgagagcccacagccctgggactaaaagatcaccacttctattaggggatgatcatccccacatgtctgctctgtgatggaacctgggctgggcctggggacactgaggccctgaatatgacccctgacacaggcacccagacataccagagcatcaccacggcttcatgaaaacctcactagaacctcatgagggcctcactaggcctccccagggcctcaccagggctgcatcaggacctcactaaggcctcaccatggctgtaccaggtctcactagagcctcaccagggctcatcacagcctcatcagggcctcatcagggcctcaccaggtcttcaccaggtctcaccagagcttcaccaggacctcaccagggcctcagctgggcctcgccagggcctggcttctctccggcttcccccctgccatccctgagtactgtgctgcagccccctgactgttctctgcctccccagggcacacatgccctacctgttcagagacttgtcctgcaattgtccacgcacctggaatacctctcctcactctttacctgagcaactcccatgggttctcaggattcaatttcaaagcagccgctggcggatgtcttctctgattcgctctcagtaagtcctcactcctttttctctaaaggcacttgcttccgttctttccccctctgaccacagtgtgtcattaaatttttcggtgtgtgtttattcttcagcctagccccatgtgggttccttaggacaaggactgaatctcattgtccctgagagagggcccagtgcccagtaccagtgtgtgcctgacaagtacatataatagtgaatgaggggcctggtcagggagacccccatgcctggatggtggcaacacagagggaagaagaacccagctgaaggcccctggggagttactgaagcactcaggacccaaccagtctgtgggtccctggagttttccaaaagggataggaaccaatcccggacactgacagcctttcctcttcaccatgaggatgatccccctgcttgttgccgtcctccagagcctgaggccaatggatggagcaagaggtggggggacccatggctatctgtgaccaatgcaggccctgctgttgtgtgagctccaccctgagcgggtggtggattcaggttcctgggtagcagatggcaggcaggaggctgtgctccatctcatctgtctgtcccttctgcaccccccccacccatagaccaccttcattcaggctggcctcccttggctggtgtgtgactacagcctccttccctcccccagccccaggcccccctgccctctggctctcctctggaagatctccctatccttcctgcagcaggcaatctggtggaagtcccttagcagctcacactctgccctgccctgtagtctgagctctttctcccaacacttcccatgaagaccaccaactactgggtcctgaacatgccacacctgtccccaggcttccacactttcacctgcacctctgccccccatactcctctatgcccacctggagagcccttcatgctttaagacagagcttgatccttgaacaccctcttcagggacctgcctgagctgcctctgctctcctgacagagcaggccgtgggagtgtaggtcttccctgctggcttggacaaatggagctaaaggggccgaaagtaggtctggcccatccaggcactttggttttgagacctgagcactagattgtgattcagaccccacttcaaggaggagatggggcataactcagtggttgtaactcccagtgtcacagctgtgtgtgctctgtctgcatttccaagagtgtgtgcaatcccagcccagccgtagcccgagggcgtccactgctcaccagaaccccgacccagaaggcctcactaagcagccttctgccccgctttctgttcctgacacgaatcagggagcctcaggccttctctggatgccgtgaatccagaatgtaaccagaatgaagaacagagaggcgtggactctctgtcctcgccacttcacatgataggtgtaatacacaaaagctgctcttctagggtgacagagagccacagaatctcagtgctaagtaagccaccatggactcgatattccagactcagccccttcctgggctacagaggctcctgcctcttctagtagggaaaggaggcagatatgagttcagggaaaggccttctctcaaaataaaaaagtgctgctttggcaaaggccctgaaagagtggcctgtggtgtgcacacacatcgacacatgctagagcttgcattagtccattatggaactgctatacagaaatacctgagactgggtaatttataaagaaaagaagtttaatttgctcctggttctgcaggccatacgggaagcatagtggcttctgcttctggggagtcctcaggaaacttacaatcatggcggaaggcagagaagaagcaggtatctcacatggcagaagcaggagcgagaaacaggtgggagatgccacacactttgaaacacccagatctggtgagaactctattaggagaacagcaccaaggggacagtgctaaaccatttgtgaaggatccacctccgtgatccagacgcctcccaccaggccccacctccaacattggggattacaattagacatgagatttggttggaggacacagatccaaatcatatcagagctattttctcaccaggaagaccaagtacctgaaggagagaggaagccctgggaagaggagaggggagaggaactgaggcacacagtgcatgcaggaaggccctggggtgggtgggagcatggggtgaggacatggtggggaggaggcttgggagacagagggacttggtggggaggaggcaggataggagaacagggctgtccacatgtggactctggccagggggagggattttctccatcccacaagcaagaataaacccagacgtagttgagcaatggacagccccctcagatgcaagcatggctgccgaatgggaaggggatgtgggcccaagacgggatggatttgggcaagatggaggtggtgaacacaaagtgaggtgagtgggtttggaggacgtagcaggtggtgaaattgtgagtctggaatgggttgggcacaagatgcggtacagcaagatgccagggaagcccctggtccctgacctctgcacctgctcatggatgttggtgcctctgtggacctcagatgagctgcttttcagcctgggcccatcccccatcagcagtaaagactcctaaaccctgatgacagagaatctctgccatctctccgttccctccttgtctacttcctccatctccagggcaccaaccacctggcctcccacctcctgccagtccattctcccagagcagccctttggggagtcatcactgtctcacttggcaaatgaggaaactgaggtttagcgaggtttgtggcctcagttgagtctgggcagcaacaactcggcagctcctgccccatggcatgtgcctgacgacgcatggaggacccccatgaaaacaagtccttcttgctcctgacactgaagatacaggtgcagacccccgagcctgctgagcagtggcttggtcacttattggcccaattctggcagctaagagtggccctttggccctcagacatgcttagtgagtcaggctgagtagctggggatcaagtgcccagaccaccagggcaatctgggattctcattggttgagaattgaaaagggaattattatttgtggggtattgtttagcaactatgccctcttccaaggcactgtcagagtcatacagtttcacagctctcctgttctatgcgaagtctgccttctttgcctgccctgtctttcgtgtcttgacatcgcaaagataaaactgtctagcaagtgcagatggccagcagctaacctcagcagggcctcccaaattcctggtgatggaagctgatgtgcagcttggctctcacactgcaggtaaaatgtcccatagcacttaaccctcactcccttctgttttattatcacattattcacctgagatggctttgaatcatgtgtacttcaacggcttcctgcatctggagagtgtcaggggagaatttcaaacatgaaatatgtcaggtttaaaatgcgccacatccttgcatcttcaaaccctcccacagctcatggcatcctgccctgaaaggccttttcccaagtcttccaggctggggctccctctgctctgactccaggttccaggagaggaagggattgcagagcctgagaggacaagccactcgatggccaatgcatagatgctagaagccaacatttgagttcgagcccactcatggctctgtgcctcagttgcctcatctgtaaaatggagataaccacactgccggcctcacaggaacacagtgaggtgaaccaagttaatgtatgtagggcaccaggagcagagcctggcctgtgctcaaatcaaatccacacatgagttgctattgtcacagacatttctcaagtacttgctaggtgtcaagccctgtgtaatttactttccgttcttatcctggctggagactcacaagtctcactaggggataggaggcaggaaaaacaggcagacgccagggtagtatctggccctgctctccccagtgggaaatgtttctgggtaggacacaggaaagaaaggctgcagatccttgctctcagtttttgccagtgagaggtgaggccagctggacttcctgggtccagtggggacttggggaactttcccgtcttacaagaggattgtaaaacgcaccaatcaggaactttcctgtcttacaagaggattgtaaaacgcaccaatgagtgctctgtaaaatgcaccaatcagcaggattctaaaagtagccaatcatggggaggattgaaaaaagggcactctgataggacataaatgaaacatgggaggggacaataagggaataaaagctggccaccccccagccagcagaggcaactgttggggtccccttccaggctgtgggaaccttgttttagatcttcacaataaaccttgctactgctcactctttgggtccacgccatgtttaagagctgtgacacgggcaaggtctgcaggtctgcggcttcattttttttttttttttttttttagatggagtcttgctcttgtcacccaggcaggagtggtgcagtggtgtgatctcggctcactgcaacttctgcttcctgggttcaagcgattctcctgcctcagccttctgagtagctggggttacaggcacctaccatgacgcctggctaatttttgtatttttagtagagacggggtttcgccatgttggacaggctggtctcgaactcctggcctcatgatccgcccgcctcggcctcccaaagtgctgtgattatagatgtgagccactgcgcctagcccgcggcttcattcttgaagtcagcgagatcacgaacctactggcaggaaccaactccggacacacctgggtcacagagactccttttaccgagggcctgaggcgggctgtcacttacccgcagctacacacgctagatcccaggcctcatttcctcctgctgggcctgttcagctgtaaacgccatcccagtgtctggcgtctgcatctgaccatacctcttcctggtctttattgcctttttctctttcattgaagtcaagggcacagaaaagtgcttgacgtgccctgcagaggccctgggtgccctctgaccacaaacatcatgacccagaaattctgctaactcagaaacacagttgcagactttctcctgagcttaggtaataattgcacttgtattttctctttctttctctctctctttttatttatttagttatttatttgttgggtcaggaatagcaatatgtcaacccaatttttttttaaatccctgagtttttattataagctacagcagtgtggggtgggagaggctgttgtgttactcaaacttgcattacagaataaaccttcctatgaaacatggtaggctgtttttggaactcaagcagctcatgagagagttgctttaggagctgtgttgtttgttttgatggcctccttggaagggcacttcagtggggcttgggtcctggacgcaagaggctgtgagcaggcagcttgggatcactgagtcccagcccccctctgtctccaggagagaagtgccctgatcaggggcatgaggagacagtcactgagcaattgtgcttgaactagctggacaaacatggaaggaagggagtcatatatatacaacatacccccattgtgcctggtctcttctaagtacctttatcatcatcctcacggctctgattttcttcatctaattaaagcacaaaggtatcatttacttgtgaaaggcacctacttagcagattgaagaacttgaattcaaacctagatttttccaaaaaaaaaaaactatgccctcataaagagagagccactggttggtgggggcgggtgggggtggtggagcgaagaagctaagtaaaacattttttttctggatacgtgagggaacaaaccaagtgtggtcatggggctgggggaggtgtcagcttcggacatccttagctcctcttccagaagggccaaggctggggattttggggagagacacaggagaggtgatggggaaggaaggagaatcagggctactaccctgctgtcccctggaacccgggtggcctggcggggccaagaggagaagtggtcacctgcctgttctcgcacctgattccctggtcatggggcagattccaggagaagccccgtattagtggatgctgacttcacggcttcccagatcccagatccccagccttccatgaagatcttacctcaagagactgtgcggttctctgaagaagtcagaggaattagtttcttggcctttcatctcacatcttggagaatctctaagcccacttgaaatcacaggtaatggggaagggcagagcacttggcatctgcaagagctcccaggaggcgcttgaagtgacactctccgtggctccatgggctcctgtgcttgctcccaggtgtcccaaggaaatcagagaggagctagttcctttttgaggttgaggtccaggctgtcagacacacccaggtcttggaaatttttaagcaaatcctgtagacctgactgcaactatccccacagaaattgcgcagggacagacatttgctctcataaatgccgctgtcagcccgaatgaagctcccagcagtgcctgacctaagatcagtgtctgtagcaatactaaacatccatgagtcaacccttaagccttcagtctcctctgaatcattctcttctgggccccccaaaatgtctgagattccttgggactgtctgtcttgaaagaggtctttgttccaagatatgagaatcaataaaataataggactaaggagtgggaggatgcttatcaagtgtaaatagtgtgcatacgtggccaggaaccctacagctaaggagtcaggctggaccaagggtgaggtggggtctgctggcattctgctcatgttgcccagagttttggaggttagttagcttttgtgggaatatagaatctaaggaattagtctcactgactttttattgtaatgaaagggcctgaattgggggctgaatcacttccctgggaagataagcgaagccactggaaagaacctcaggtctcggacgggagcagtgaagaaacagacaaaaagagagtcaacttctagtcctctctttacccctgccagagccctgaaccatgggaccagggggtgagggtcctggaatgttcagtgactccagaagccagttaaccacagagaatcatgcgaaaaacttcagccacctaatgtagctccactctgtgtccgccttgagtgcaaggggcttggggaacggggctgctaagtgaagcagtgtcacttccaggccttggcaatctcattgcagctggagtccatggaagctgcagtgctgaggccagcagacagcctgccaagcctgagatgcctgatgggcaataacaagaaaggggagctccagcctggcttggtgttgagtctctgggaagaaaaccaaacaaatccagggtgggttagctttctcctgtggttgtactctctctcctgcagtcaggagaaaggaaagaaagaaaaagagagaaagagagaaatagacaaggaaagaaagagaaaaagaaggaagggaaggaaggaaggagaacaatgaaagaaagagagagataaagaaagagaaaggaaagaaaagaggcaggaactaggaggccttgacacttgtgactgagccctgcagaagggtcagtgatgaggacctcagaaagtaaagacctcacctggaccctgaagctcacttccaggtgttctgctgtgaagccaggactggacaccagagcatccactatggcaagggctctactctccaggccacctgaaggtatcaggggtttctgacctggagacgagcaaacacagtgggaggtgctgctgcctggtgatatctgaggtgctgatgtggagggaggacaggcttcttccttatgacacccagagctcaagttggggcccacagggaccattcaaaaggaactcaagttcagtgtaatctgagtgcatcaactgggatttaccaagagaagcagacccagtaagagatagatgatttgttgttgggcattgagctaacgtcgtcctgggggtggttttgttaagtggtctctgcaaggttatggtccccacagctgatgctggagattgaagtctatgaagtaggccatcaggaagggaagagcgtgagcaagttggaacccgcaagcaggagggatggcggagaccatgcccatgcttgttgcctctgaccatggtgacaagggtgtcctgcagaagcagggactctccctcacagggttaaacacatgcacctgggccaggaggcagagaaggtggcctggctgtggcttcatgccactggggtgaatcgccagaccagcaacaataggtgtgtgctgctatttccccatcgactttccaatctcccaagacttttctgtgtggctgactctaaccataaacagctgatggtgagcaccaggaaacgtagtcctggccagccaacctgatatcagaagaccagcacagcaaggaaggcctgtctcacattcagagctgccctgagtgggatgggctgttctgggggaaggctgtcccctcagtagctccacgcaagcagcagctgcacagctacccagtggggatgctgtgctttggctatgcaaccatggtgggagggggcctttccttcatctggcctggaactcaccgtaaatgtcactcctttggggtggcccactgtgaaatgaaattgccctcataaatgctgccctgaagaggtctctgggtgtgggactgagaagaggctctaggaatggacagtcagggagagcagagggtctctgccagccctcaccataagcatgggcctggtagagtggatcatgcagcccaggtcctagccccgatgtgtgggtatagcagcagctctgggcacccaggatggcagcctgagtgcaggccttagaatccaggctcgactcaccaccccagtgggtaggtcagctggctccatcctctcccctccccaggaccagctgaccataactcagcaggttgggtgctggccagtcccggagcctcactcctaggtgggaagtactgagaagtccatagctgttggaaaaaaggcctcaaaaaacccacagcaggaaccccagaaaggggctctactagtgaggacatcaaggaaactgtggaaattacttacgcatttctcaaaaattcaaatatggcactaggccacctctatgcacaataaaaagatggtcagccaaactggccctcacctggttctgctacttccccacttctgctgcttccccattgcaggaagatggcagctctataaacctcagtttctccatctgccaatcaggaaaaaaggctaatggtcagtgccccttacagtactgactacataatatgctatgcacagcctagtgcaaaatcaaaatgtgggccctctgctcaaaagttaagaatttcaaaaccacaataacagcatgttacaccaagcacagggctcttctaagcatagagcacagtagggctgcacaaggaacgccatgtgtgaggcaggccctgccaacacactctctggtgcctctaccgtgtttcaaaagcttgtgtatgtatttatcatgagaatggaggtatatatcctgcagctcatgctgtaccttagacatgccagtatgggtcgggatatatttagtctctggaagaattttgattcaagattcctgggtgaccaaggacccaagttggaggcaccctagttggggcctcgacttatgaaactaaaatcttatttaaataaaatgtccttcaaatgcaagctattattacaaaagatcctttttaaaaactgtgaacataagaccacagagttgctaaatgtccacagaatatgcatatcctgaaaagggaacatttgtgaactcaatggggatcagcagactctggccagtggggccacgggcatactccccagcctccacttggggctgtaaaccgaaaataaaattcaaagaccctcccactcctgcaactatctgaatgtacttcctccttcgccaaggcactctaaaatgtaactttaaagactggttcaggccatgactggaagtggggattgtatatgcctcattttaaacctcccccagcattaacatcaacacaggccttaagcctaataagaaacagttactgtcttctctctaaagcctgctacttggaggcttcatctgcataaaacccacgtctccacaacctcttggcgtaacccagacatttccttcctattgatgatgactctttcaacaaattgccaatcagaatatgttgaaatctacatatgacctggaaacccctgcttcgagttgtcctgcctttccagatggaaccaatgtaaatcttacatgtattgattaatgtattatttctccctaaaatgtataaaagcaagctgcaccctaccaccttgggcacatgtcatcaagaccgcctaagcctgtgtcgtgggcgcgtccttaaccttggcaacgtaaactttctaaatgcactgagacctgtctcagatatttggggctcacatggcctccactcttgcccttggcctcatctatgccatgccttgctccagttctaccaaatcgcaggggcttccctgaagactgtgcattgcctcctatctctgggcctatgcacatgctgttcccctgcctggaatgccctcgccattcggaaacagcacccaaaacaccactgtttcccttcgcaattcaactcccacatctcctttgggaagcttcctggatttcctgggaatggttgtaaataataataataaatatatgacatttattcagtatcgattatgttttagtcactattataagtaatttacatgtattaactcatctatacttcacagaaaccctcagataaatatactatatcctatcattttatttaatattaattcccattttactgctgctgacaagacccaaagaagtatagcagcttagccaagctcacacttccaggcagtcttgctccagaatgtgtgttcttgcctgctccacaattctgccactctcagctagttgctctttgtatctcatatttacctcctccgtgcacatatcccattggattgtgaccatttgcttatctggcttttttcttgagtgcagggactttgttctattcactattgtcttcctgtacctatcagaatgactgatactaaaaggttttcaacgagtattaacaaaacggaagagcttccacccaaatgctgatgcatcgctttcccacatccaggcctcctccaagctgtggcagactgcagaccatcagctggcccatcgcgcttgagcaagagacaaggccaagtccccagcgttctctgctggcctccttctaaaccagacaccggacacagattcttggagcccccaccgtttggttttaacaggactgtggcttgccctcaaagccttctcatggtgatcagacctaggtagatgtccctgccccgtgagctgagcaggacttttctgaatccagagagagatttgtgcctatgagagaacatgccagggagtatgctgcctccaaagatcgggacatgcacctgctgtgaaggcagttcttgtgggtgcggtctaggagtctcctcttgcactcctgcttcttggcctgtaaaatcaaactttccttcaaggccttactcaaacctccttctcctgtaacagtcagattcctagtcagcttccttgattccttttccacctgcctcctcacattgtgaggccatggttctcagctgtgctgaagtaaattatgaggtcacttataagtgaggccttacaagtgaccataaccttgcttgatttacaaacataagcaaagcttaacttgagctatttcttgtaaatgcctattttaaagaaaactgaggccaggcatggtggcttatgcctgaaatcccagtgccttggaaagccaaggtgggaggatcacttgaggccaggagttcaagaccagcatggacaacaaagcaagaccccattcctacaaaaaaaaaaaaaaaaaaaaaaaaaagagaaagaagaagaagaaagaaaagaaagaaaaatgaaacttaaggataatcaatcagaactgtcaactcactgacaattatataatgagaaactttccaacaggataaatcaaataaggcaactctataactgtagcatatcaacttgtatgtatataacttgtatgtatataagtgtaacaaatcaaacatttcctttgctttacttcttcattcaccatttaaaaaagcctttcccttgcatctcctcagtgcagcctgaaaccacctttggattagtacttccaaattcatgaattgctgcttgctccattaaactctttaaaattataccatgctgcagtttaccttttaacagccccattcccattagaaactccttaggagtattttataaatactgatgtccatgtctcaccctagacaagctcattcagactgacattttgttaaagccccaaggtgatgccaacatgaagacagggttgaggacctctgttctggagcgacctatgctaggacatccttgtactgaccacccctgccctatgagggaattaactgccttgttactaagtgcacaaaagaagtgctcaagaaatggtattgaaatgatagtgattagaattatgaatgctcagtttctccttattgataaatcctttcatatttgagaagctttaatgcatgggaaaataatagtcttacaatttgtactttgataatgtccagtttattcattgtataaagatatcaaatagcatttctttgaacattaaataagcatccctccaagtattcagttcacactacaaatacatcatttaacaacttaaatttccctaggcattcaaatatggcaattataaatattttgtatcatcaaattaaaatcaaaagttcaatacaacagattttttgaaggaaaactttgttttttcttttgtttgtttgttttgtttttgagacagagtctcgctctgtcgcccaggctggagtgcagtgggacaatctcggctcactgcaacctctgccttccgggttcaagcgattcttctgcctcagcctcccaagtagctgggactacaggcctgtaccactatgcctggctaatttttgtatttttaatagagacgggggtttcaccgtgttagccaggatggtctcgatcaatctcttgacctcgtgatctgcccgccttggcctcccaaagtgctgggattacaggcgtgagtcactacgcccagcctggaaatcttaaaataaaaaaaaaatcttacaaaatattacagtggttacaaattgatgaatgggcttgtgcaaaaggacccagttagaaaaaggttaacccaaggatttcaatgcatgctttcttatctctattatcattttagtttttaagttctattatcattttagtttttaagttcttattcttactctttccctgggtagcagatcctagcccctgccctatctcaagttgctcagactcctttctttgtaaagattttatcagtcttgaataattataggactgttacaattatatagttcttatttgttgcattttgacagtttgtggtttttgagaaagtggtttattcttttaagttgtggaatttatgagagtaaagttgttcataatatttccttattattcttttagtggctgcaagatctgcactgatattcctattttatttctaatattggtgatttatgtcttttttcctgttagaggtttatcaattttattgaattttctcaaagaattagctttttgtttcattgattttcctttgttgttttttttaattttcaatattactgatttctgctcttacctttatttcctttcttcagcgtgctgtgggtttatttggatccttttctcattccttgaggtaggaatttagattattaacttgagacctttattttcctgatgtaaggatttagtgctgtaaattttcctttcagcactgctttagctgtgtctcatatattttaatatactttaaaaattttccattcagttctatgttttttttttagtttcctttgagacttttctttgattcatggattatttaatttctaaatgtttagagtttcctttttttctttctgttactgatttctagttgatcgtattgtgatcagagaataccctctggatgacttcttttaaatttgttgagggcattttatgggccagagaataatctatcttagtgaattttccatgaatacttatgtttaaaagaaaagtatattctgctgctattgggtaaagagttctgtgtatgccaactagatattaccggctgactgtgttcagatcatcagtatacttgctgcttttctgtctagtattcagttgctaaaaggagggtgttgcagtttttaattataattgtgaatttgtctcttctttcatttctatcaatatttgtttcacgtattttgaggctctgttgtttggtacatgtagatgtaggatgttatattttcctggattgattcttttatcattattttattataatgtccttcattgtttttagtaattctctttgctgtagagtttactttatctgatatagacatagccagtcctgccttttttctagttaatgtttgcagggcatatattttcccattcttttactgtcaacctacataagccattgaatttgaagtgaatttcttataaacagcagatagttaggtcatgctttttattccactctacaaatctctgctttctaatttgtgtattaagacaatttacatttaaggtcattatatgttctcaagtctaccattttattatttgtttttttctgtttctcttttcttgtcttctgataggttacttgaacattttttatgattccatcctgatgtatttatagtgcttttacgtgcatctctttttatagttttcttagttcaggatattgcaatatactaatatgtcttactgtagtctactggtatcaatattttatcactttaaatgaaggattaaaacctaacttttattaagtcgctttactttcccccacgtttaaatattattttgcgtactagatagtgttatagcttctatttcaatcatcaaatataattgataaaactcatcaggtcagtctgttgtatgtactcatatttctgctctttcttttgttctacctttctgatgctccaatattcctttctttattttttattttttattttttttgagacggagtctggctctgtcgccctggctggagtgcggtggcgcgatctcggcttactgcaagctccgcctcccgggttcatgccattctcctgcctcagcctcctgtgtagctgggactacaggtgctcgccaccatgccccactgattttttgtattttttagtagtgacggggtttcaccatgttagccaggatggtctggatctcctgaccttgtgatctgcccgcttcggcctcccaaagtgttgggattacaggcgtgagccaccgccccggcctcctttctttattatttactttctatttaaagaacttcagccattctttacaggtaagtctgttgatgacaaattcttctaaatttttctttttctgagaatatctttacttccctttctttctgaaggatagtttctctggatctagaattactagctgacagttcttttatttctatacttgaaaaatgtcacgccacttctttctgcctccattattccagatgagaatcccactgttactcaaattggtggtcccctttaggtcatgtattgtttcgtcctggctacttttaatttttttttcttttggttttccaatgtttaattatgatgtgtcttggcatgaatttctttgggtttttcaaatactgagttggatcaccttgaatctgctaaatctggaagcttttccacaattatttcttcaaatactctttcattctatatttcttctttctttctgggatttcaatgatgtaaattttataacttttatttttgtcccacaggtctctgagtctctgttcattcctcttttttttttagtttattttatttctgtccttcagattgagtaaattctttcgagctgtcttcaggttcattgattctactgtcatctccactgagctcattcagcacatttttaaaattgttgttattgtatttctcagttccacaatttttagttgattattttaaatactttctattgttttgctgaaatgttttattagtccgttcgtttcaagaaaatccgtaattgattgttgaagcatttttagagtaggtgcttttcagataattccaacatctgattcgtttcaatgtgcagggtcagttgattgccttttctcattcaagttgtaatttttcagattcttagtatgatggataatttcagttatatcctggaaaatttgactattctaacactctagattctatttaaatatattattttaacagccaggggctctgtttaggattagcccacaggtctgtcctacttttgtcagctgtggttccaatgacaatataatttccgagacctgtgtggtgttattttggtttgcttggtttatctcattttcccactgcttcctgctggtgctgcccgaggggacagaagacgttgagctacctgacaccaccctgtggggaaaggaagtttccggactgccttttggcagaatctcccttgcttttgagaggatagagagggctttctggttggccacttgcaaaaggatctccttgcccatgctgctttgctactgggtgtctgtcatgtgggagaggagtcttgggcctaaggagaaaaagaggcttcctgagctgggagcatggagttgtagggcctctaccccagcattgccttctgtggtctcttgggagagaagagtctcacaggcagcagggaaggagagtgctttccctgactacctattgtcagtggggctcctgattgatcccatatgaagtgccactgggctcgcctgctgtggccatcagaaggactcccgttcaatctggggaccttcctacctgggctgccttctgttgctgagctggggtttcagaaacactatgcctgaatctccttcttcttcttttgggtgatgggaaattgcaagtcaccctgactctatgttgtccctccaacccttaggtttctaatcagtttaccttcctcttcccacctttcagagttcttttcattattttcagggtttactgttgtactcggtggggaggaatagggagaaacaggtatatttcatcttgtccaggccagagtatctagttttctttctgttatagatttctagcttaattttctcataataagagaactctcataaagcaaagattttatagattcagtatgatggcatcaagtccataagtagacttctttattgatagaaaaaaggaaacaccagtgacaacatagagatgtgtgacctcctgactattgtagcagtggcagaaggaaggcagatagaagatggttatcatggtgatatgaaagatgggagcatttatgagaatgtaagagcatttttacttaagaaattactatgaggagaaaagacagtgatttttgtggtgtctgaaatgatgctaactaataggtatggccaactagaggcaaagaattattgcctttggaatcctaaaactaccctcaaattttccttcctattctgctatctgagagcttatgaaaatttgagtcagcttttagccttgacatataatctacaaatgtcatagctgttgcatacttttctctataaatgaacctctttctatatccttgtattaatagtgtttgtaactagatggtatgagactggcaaaacaaggcttatctaccccaaataacagatattctcaggagtgccagtcagggacatgtccatgaaattcatgttcttataaccaggaagtgggggctttgtggacaggtactactaaaataattaagccaaagctaacatttaaaattctttttccaaacaccctcaaatcttttcatttctcactgtgtggtttgcagtttactctggctctttttggtggaaaaatttgctcacttacatatgaacctcacatctcacatattaataggtttggcctttcagtgatccttctgtcatatatgcaatgtaaaatttaaagacaattacggatggtagaaagagcttcttgaactaatacacaaatgaattaaaatttgtatggaattataatcattaattaatttaagaaagttccaagagtaataagaagccaaagaaagcacatagtcttgattttctgagaaaaatttaaactttttacatttaacgcatctttgtacattggctaaaatgtaacttcatggccctaaaactaaaatctttgctagaaaagatggagttgaacataggccgactgagctgccattcttattagttatgagagtttaagaagacaacaaggaccacatgtctaagagacaaatggccattttaaaggcatgatggttcttggcaaaagcacatgtgactgttaggtgttgccaaatgaaagtgtggctgaaatggcccaagctggtttggtgaaaattgcaaagagacagtatagccattagggtcattcacaaatcttccaactttacacacacccctcccccaagtgtattctaaaatttgcttccctgctcctttaaagttatgtgcagctaaatccagcttggccagtgaaatgtgcaaaaccccttaagatccagcaaagagtgcactgttcctttcccccatctcactgataataaaagtacatatacagacatataaaagtacatacagagatacctcctggtaacctggcatccctgagaaattgcaatgagcaaaactccctttctttgctgggcatggtggctcatgcctgtaatcccagcactttgggaggctgaggcaggaggatcccttgagcccaggagttcaagaccagcctgggtgacatagggagaccttgtctctaaataaaataaataaataaataactcccttccctaaatttgacatgtagcatgagagagaagcaaacttgcattgttgtcttcgtctgtttgggctgctacaatagaataccatcaacctggtagcttataaagaacataaacttatctctcacagttctggaggctgggaaatccaagatcaaaatgctggcagattcagtatctggtgagggcccactttctggttcataaatgtccatcttcttgctacagcctcacatgacagaaaagaagagggagctttctggtgtctctcttataaagtctctgctcttatgacacaatcacctcccaaaggcctcatatactaataccatcaccttggggtttaggatttcaacataagaattttggagggacacaaacatacagaccatagcattctttcccctagccccccgaagttcatgtccttcttgcataaaaaatacattcattttatcccaacagccccaaaagccttaacttgttgcagcatcaacttgaaagtctaaagtccaaggtctcatctaaataccatctaagtcagttatgggtgatcctcaagatacaattcattctgaggcaaattgctctccagctgtgaacctgcaaaaatcaaacatgttatgtgctttcaaaatgtcatggtgagagaggcataggatagacattgcatttccaaaaggggagataagaaagaagaaaagagtgacagtccaaaacccaattagacaaatgcctttcaaccttaagtcttcagaatcatcatctttggcttgatgctctgccctccaggcctgctggggcagaggtcctaccttctagacctactgggtggggctctgcattcaagacccaccaagatgggttcttgcctctacggctcttccaaacaggagtcaagccctcagttttctaggcagctccacctcagtggcagttctgtgcctgggccctgctcctatgggagtcctctgcctaggccctacagctctccagtgttggggttccaagctcttggctctgccagaagaccctcttctttgaagtctaggtggagatatccatgccccctggctccacggggcacagcccacaccaaaccagggctcaccaaagctacacctggggtagccaagaagtgcagttccagagtgttaaaacacatgcgcagtggagcctgctatgtgaggcagtgctgggtaggacactgaagtcctgcggttgccagtggcccttcgtttgcatattttcattgtctttaacaatagctcctgtcttctgttgagacagctgattaatctccttccttagcagtcatttgaccccatccttagtgttctcttctgaccatgctttctcatttttacaatacggattggctgagaattttccacatctttgaattttgcttcccttttgatgaacaattttgtctttaaatcattttcctcttcttgcattttactataaccaatcaagagaaaccaggctgatcctcaaacactttgcttagaaatttcctcagccaaatatccagttctattgttcacaagtttactctccacagaacactaagatatgaacacaattcagcaaaatcctttgccactttatgatatgttcctcttctctgtctgagacctcttcagatggcttttatcatccatatttctacgaacattctgatcaggattatttaggtattgtctaagaagactgaaactttatttatagttatcctttctttctgagccctcaccaggatcacctttaaaggttcattcacagcaatgaacgaaactttctaggatgatgaaaatgctctgtatctggatttaggttgttggttatgcaggtttgtcaatactcctcatttatatgcttaagatctgtatatttcactacatacaattttaagatatttttaataggataatttgtcattttagatatcatgaatcatgatatcaggctgaaggctttttctagcattcacttcaaaactcttccagcctctacccattacccagttccaaagtcccttccacatttttaagtatttgttacagcagcacccccactttcagtaacaattttctgttttagtctatttgagctgctataacaaaataccataaactggacttataaacaacaaacacttattttttgcatttctggaggctaagaaggccagatcaaggtgccagcatattcagtgtctggagagggcctgcctcctttttcatagacagctatcttcttgctataacctcacatggtggaaagggggtgagttctgtggggcctcttttataagggcacagatgccattcatgagggtcctgccatcttgacttggccacctcccaaaagcccaacctcctaatactattaccttgttagactttcaatatatgaatttaagggaggcacaaatattcagtccatagcagttgtgttaaatctccgagatatgggattatttgttactgaaatgtaacctagaccacactgactgatataaagtttattcaacagtcttggtgaagaaaactgttatctgctgagtaccaggaaaaaaattcagtgtctcagaaaattagtagttaattaagccctatcttcaataatttctttacttcaaatttgtaataattcaaacatttaatccctttaaatgtttgagaacttgcaataggtctaatactgtaggtctaataggtctaatatattcaagtaggaaactggcaagtaacatccaagagtcagttggccacccatgcttgaggaggctaatgatcccccagttgttggtaggaacaaaatgaaacctccaggatagggagtggacaccaagtgatagcactcagacagagatttgtcactggggtgggctgtcaggccccacctgagtcccagaatcttaaatttcttcttcccaatccccagtgctgcttgacccttaaacagagcattaatctatgctcacaaagcatgtgcaagtttaaagcacttagaaaaattcctggtacggggtgagcatgctatggttatctctcagcatcagcattattattatttttattgttattgcctcaatttttggatgagaaaactggaacttagagtgattaattggtccaaagtcctgagattataagtgactgagctaggatttgaattaaggttcaaattaaatgctctttccacagcatcagctacctcttcagtagcttatgcttgagctggaaagtgacttctcccaaaaacaaatgtcaaggagccaaaactgaaaggcaggtagaaatggctgtacaaaaaataaattattgagaccttaaactaaagtttggtccagatttatgcttctggccatcacagaggaactggctccagacttgtccttctgtggaaaataactataaaactggatgacttttcaagtactgaatacagaaaacacaggcttgtgattttgaagagaaaagaatcacgtgaagtgagcttcagtttcactgaggttttctgcctggaggcagcttcgagctgccatacagggaagtggaagcagagctcaagcagaggatgacgaactgagtgaggaggcaaaaatcccaagtatgggagacataagctgctgaagcagccggaatctgtgagatagagtactagagaaaaggagtttccaagagatctccagaagtctccacaagttttctgtaggtcttttgtgagggatggactacaaatggccaaggtgagacgtcctaaggcctggatgcgatcgtgtgctatggagctgaaagcttgatagaaataccaaaggtgtgtaatgctgggagatgcctgagttcctgctgagtgggagggcaggaatagctgactgcatcagagattcactggcaccccagaaaagccatgcctaggagcaaggacagccctagagtaaaggacttgccgtagggctaagttaagaagccaggttaaaaatctaaacaaacaagcaacaaacaaagaaacaaactacatttacacccttcctaagagagtcagaagccaagcctgatagacagaaaatgatctagtggcaagtgaattgcctgccaaacaaaactcaatgccctatgaggaaaatgacataatttggataccctataacatgtcatctaaagtgtttaacattcagtaaaaaaaaaaaattagacatgtgaagaagctagaaaatatgaccctttatcaaagaagcagaaaaatgtgacccatgatagagacaaataaggagtcactagaaattgaattcaaggtggttcagatgttgaataacaggcaaagttgttaaagtagctgtgataaatatgttaaagccgttaaaaatgtggtcataccgaaacaaatgtgagttctaaaaatgaaaagaaaaatgtcgatattgagaaattcatttgataggaataacagctcacaaaaggctgctgaagaataagttagcgactgtgatgcagatcaattgacattttcaaatccaaagagaaaaaaacctgaaaaataagagcagctcctctgtcacctgtggaatcataccaaccagtctaacataggtataattagaatcccagaaaaatagaacagagaatgtagcagaaaaatatatttgaagaaataatacctctattttttcaaatttagtgaaaagcaaacatacagctttaagaagctaagcaaaccacaggcaagataaatacaaagaaatccacatgtagtcatatcattgtcaaaatgcaaaaaactaaagataatgtgaaaatcttaaaagcaattaaagaaaaaaggcatgttacatctagagaaaaatgtttcaaattatggctaaatttagtcttgtaaattatggaaaccagaaggcaatggaacaccttttaacttctggtgaaaaaaaagaagtgtcaatctacaattttacaaccaatagagctattttttaaatgaaggatatttacatataaatgaaaactgatagaatgtgtaatcagcagagttgtcttataagaattgctaaaaaaaaatattcttcaggctgaagggaaatgacaccagatagacacttgtatttgggagtggagagtagcaaaaatggtacatatgtgggtaaatataagagaataatatattcttcagtatttatgcaaaccttaccagaatggaaaagaaaatatacctaactatatgttgattgcaagagatggacttgaaatataaaggcaccagagagtttgaaaataagaagaagaaagatgcattatgaaaacaggaaacataagaaagcagttatgtgcatattaaaatcagaaaaaggagacttcaagcagaaagtattttcagagattgcagaggtctaattttataataataaaaggatcaactcattaataaggcataacaattccaaaacaatatgcatcttaaaattgttcaaaatatataaatcaaaaattgacagatagagaaataaaaaactgtgcaattttagttggagattttaacaccccttttaaaataatttataagactacatgtacatagaatactataccaaaaaactgcagcacatacattgttttaaagtgcatttggaatattcacaagacagatcatatctgtctataaatgcctataaaatgcttcaataaatttaaaatgattaaaatataacaaagtatattttctgactacagtgacattagaaatcaataacaataaatataaaaatctcaaatatatgaaaatcaagaggtatacttcaaaataatctacctctggggaagaatgaaaagttagaatttagaaaatatttttaaccaaatgacactttaaaacacaacatatcaaaatttgtggaatgcaattaagcaatgcttagtgagcaatttataactttaaatgctaatattagaaagaaggaagaattaaaaatcaatgatctaagtttttacctaaagaagctcaaaaaaggagaaaaggtaaataaaaggaaatcttaacactttgaaaaagaagttgaaaagggttatagccactttggaatccattttgaagtttcttctaagattaactaacagtggctgagcaattggactcatgggtatttacctaaaaaaatgaaaaaatagtttcatagaaagacttgtaaaagaatgttcatagcaccttttttcaactttattcaaaaaagcataatactagaaataacccatatgtttaccaacaggaaaatggaagaattgtcctatattcatacaatgaactactgacccatacgtcaacatgaatgaatcttatagacatactgttaaacaaataaaacccggtatgacagaatatatactgtattatttcatttttctgaaattcaaggacaaaactaatctatggtaattatattagttattttcgcataacaaattatgccaaaactatttggcttaaaatagcaaacgtattatctcaaggtttctgagtcaggagtcgaggcacagtttagttggatgcttcagattcagatctccagcaagcctacttcaaggcgttggctggggctgtggtcatctcaaggcttgcttgggggactgtgtgctcccaagttcactcacgtggctgttgactggagacatcgcttctttgccatgtggagctcttcttatgggtctctcccatggcagttggcttccactagagctggagctccagaagagagtgaaagaaatgatgagaaagacagaagtcacagtgtctttataacctaacctcagaagggatagcaagttacttggcactgcacacactctggtggagggtattgcaccagggtatgaacgccaagacaaggatcactaaggccatcttagcagctgcccaccatggtgacagaaaccagaacagcagggaattgactggaaggggaacaagtaaaccttctgggatgatgaaaatgctctccatctggatttagattgttggttatgcaggtatatatgtttgtcaagactcctcagtttatacacttaagatctgtacatttcactgcatgtaattttaaaatatttttaaaaggataatttgtcattttagatatcatgagaatgaatgcagacccttctacagcagaccaaacagaggtaaccacaaaacaacacactcatttatcatgctacactgcaagtatataaacctaataaagtcaaaggaacacaaatgttgtatttttacaaggctctatttactctcctctgggaagggtgttcaggatttttagccaaacctctaagacttggttggggatctgaggacaaccaaccacagtttcttcttttaaagtatctgtctagttcccaaaaagggaagagacaggcagccttctttaagacttagatccctccagaaagatgagaaatggagctaagatcagggttggggctgaggacaattgaccataatcaattccctgtctcaaaatgccgtacttctaagagggctcacatggatttttggacaacaaacacctcatagaaaagagtattttgacaaataaagtataactgaatcagaaacaggcggctcacatttctcttaaaacataccaggattttaaaattaagaaaaatcttgcttgaccaagtacctctgaagtttttcagatctgaaacatttagaaaagcagttttacctactttcataacccaaagtgcatgcagattgtcatcttttggaagtggatccactggaggtgaaccattttgctgtttatccctttaccatttggacagtgacagtggctagttctcttctgatggccaaattattttcctttcagttgctgacagctattcatgtgctgagctccatgctaggcacaggggaagccggctggcagctctcccactgcatcggacaggcttagccaaaggagagggtttgaaccctcctcccaaagatctgattggctgaacatgcagtgagttcccatggtagccttgagatattttctttggtgttggggttttagcaggagaggcttcaagcactggcctccagtaaccaatgccccttggaatttgcagtgccaagttcaaatatttccaggattactgaacccatgaggccaaaaatcagagaggaaatgtgcaaaggctatatgtgtatatttactaactcttcatctggtctccatcttcttcctctgaagtagtgggggaggctgcccaaccatgatgcaaactcaaagtgaagcgtggttttggaaaatcacatccaataacaatgtaacacaacctcgggactgtttaaaatccagagagttctaagtgaaggagagcgacctctatcaatctctgtagtgtagaatgaactgcaagaatcacagataggtctgcctgtgcacacgcacagcccagtctctggcatccgctgaggactcagccagtccagccattatagcagacatggggcaatctggaggcagtctggccccaaccagtctcttctcaccaacacctcttcccataaacatccacacacacatggaaaaatgtgaggaatccattttcatttgattcgagaatgccaatcttcaagggcccagctggggtacagcagtgtagcaggaaaatgtatgagctttgggccattcttcactgaatttccttaagcaagtgatttacattctctgagccttagatagtggtacctgcaaggagtgaaaggcaatagaaaataaatatcaagattggaaatgggccagcatcagggccaccttattgcacacttttaaggtgctatcttaacatcatacttcatgtaaatagtgcccctggagtcatacaacttggtgcttcttactgccactcacaggttcagggaccaagactggcagttcccaaggggaaagatccctgaatccttctacaagactttgttctgagatgtagaccacaggaagcctggccgaatctggaaagccaccatacaataacaagataatttgcaaagaaaatatttaaagtaacaaccacaaaaataaaacccaaagcaagatgggctcaaaagccaaaagttaaaacaaacaaaaaagtataatactatgaatattaacaaatccagtaaatggaagaattcatttccagaaaaaatgataataataaagtaatctgaaaaggactttaaaataggtcaccttaaaattcctaaagagacaaaggaagtaatatattcataaaataagaataggaagttgtgaatcaaatattagagattatgaacgacaacaggagcatacaaaaaaccagaaatctggaagtgaaaactatactcatttgaaaataaaaacaaatgatgacagaagagataaacaggagactgaacagagtcaagaagtgatgatttacaaaatgaaatctcttataacctagttagtaaagagagcaaaaacaaaaaaagacattatctttttcctactcccaaatcccctgtctccctccactagcctcatatatcctacaactctttcccctcagaaatgaatcactgaacacgaggtttaggttgcaggaggaacgttttggcagaactgctcttggcggctgtcatcttcctacctgctggagtttctgcagtcggcctctcgacgagccagtctctagacagcttggccatttattctaggcatcctcaccaaaggtttatccagtccctgctggaacattccagtgacgggaccgtctacatttagtgcctctacctagtaggggaaagaatttccccaaaatagaggcacactcaatctacaacccaattctacttaatttgtattagaaaatctcatgttactgaaggtagggaaaaattgaattcagttcattgtgatcccccctttcatccccagggatgtgagtatgttctagaggggacttaggtagagaaagcacctggctcttgagtcctctgtccactcagttgtctaccaagatgagcaaagtgtcatctgatccttgaccttgggtcccaggctctctacttgagcctcctcgtccccgcagctgtggttcctgcagatcccgagctggcaccagcccacctatgccattcctaggcgggtggtggggtggtcacaggagcctgcctgtgtctttgaggggtgtgctggggcactggaagcctggtgagactctcaatggggaggccgtcaaacagtcagtgactccccagggcctccctgcctcctggaggctccaccatagcctgctcgagaagtggggcatctcctctttcctcatgtaatctcatctctcttccacacttgacccctccaacacccacctcaccaccccaagttttttccagcctctggaagaagttcctcccttcctaatggtgatgatccttctctcagaggtacaggatattgtttcataacaaactcatgtttttggaaacacaaaaatcagggaaggccattccccatcactctccaaaatggaagctgagaaggaaaggggaaatgctagagaaagtagacagtaatggtgtaaaatgcaaacatttactccactaccctcatatcaaactgaatgcccctctctgtagctccctgccggggtgttacctcctggctgggactcagggcccatggcctccagagtcttctcttctctgaggggagcatccccagctccttcaaccatgtgacagctctgtggttctccaccaggttggaaaatctttctgagaaagttgaatgaccttggaaaatttccttcacctttctttgccctgatagctttctctgtacaatggggctaagaataggccaggcctcctgggctgcagcagctctgtgattggtattgtgtgaggctgggaggctaaggtcggcttctctccccagctctgcccctgccacatccccataagtgacatgtattaacttactcaatctctgcaaaaagccttaagggttaggctattatgatgctctccatttcacagaagggaatgggcataagaataagttaggtaacttgctgaaggaagtgaagcagtgacattcaaatgcagcagtcggctcccaagccaaacactgttccattcactttctcaaagcgtggtgccatggcctcaaaccctttaattgttctctatgtttcatcagcctttttcatttctaagcttgtcggcttctatattctctcttttttttctgttaaaaatattttccatagcttatcgatttggtgaatttattttttaaggaattaacccacatcatgtagcctattgtttctcttttcagtttatttctctatgctgtttgtatttctttcctccgctcatgttctctgagccagcatctttctttgttaactttttagatcattaaagctcacttagcatttttaataaaattgccatttaaagaaattactttccctctgagaacggtttggcctgagtccacagagtatctgtgttttaattgttttcttaaatgtttgtaactttcttcgaatttcctccctgcctggttggtacttaggagactacttttagattttgtgtggttaggtaccttttttttttttttttttgagacggagtctcactctgtcgcccaggctggagcgcaatagtgcaatctcagcacaccgcaaccttcacctcctgggttcaagctattctcctgcctcagcctcccgagcagctgggattacaggtgtgtgccaccacccctggctaattttgtatttttagtagggatggggtttctccatgttggtcaggctggtctcgaactcctgatctcaggtgatccacccacctctgcctcccaaagtgctgggattacaggcgtgagccaccgcacccagccatggttaggcacttttatatcttgcttcttctgcttatttctaatttattgtctgaggcacagaatgtagtgcatataacgaagggactttttgatgtttctattcttttctttctttcattttttttcttttgcatgctctgagaactccttggctgcccagaaggttccactgagcacacttaattccttgcagagtcttgcttagacattgatggcctaaaccatggtggttggcgaagatcctattccctgtgggtttctcccaattgcattgaggtccctgatgaagtaggtagaacaaacccaggcatgaagggctggtagcagttggggagccagggccggacacagggaggccatcataaaaaacagccagggaatccaccactggggaggatgaggccatatgtagtggccgtagacatggcaacctggatccctctgaggtctgtggggaagaagcacgtgggtcaactgtgatataggcaataagtatgtagattctaggtgagtcaaatgtcaaaaactgatggggacccagcttacatgagcttcacatcaagcaggtgggcatgctttgaattagtggagatgaacaaggacacagagaatttggcctttagccaatcgcatattttcttatttatttaatgagataaattgtatttatgtatctatttattccactattatctgtagaaggtctactgtgcacctttctggtccctgctaaaacactgccttcattccactgagaagtagaccacataggtctcaggaccttctgtggtttcactcactcctccaaaaatgaaatatcctttctattttttgatttccaatttctaagtttaggggtgcttcggtggcatagtagaaaaaaggtggggccccactttattctgtgtgttaccctgtgcaaatcatcagacttcctggatcctgtttttccatctgtgaacaaggagtgaggggctgccttttaggcactaaactggagaagcctaaagagcgagcagactgtgaagcacccacaaccacgggtgacagcggtggtgggaggaggtgaggtggcggttaaagcagtgaagcccctcgtcagacttaaccatgccgcagcaggtagcacagagtctgaaatccatgcagcttcccccatgtatgcctttcctgcaaggatttcacatacaagtaagaagtgtggtccttctcctgttggctctgatatcctttccaagtagtcaagcctttaagtaacagccacactcaagcaagaagaaacactggatgagggaatgcctagcctccctcagcctgccttttcttctcctcattcacacaccagtctagatttgagactggggcatttaaacagccccgacccctcacatgggctgagtttaggttacatctgctgctggttcatttctagtaactggatttctgccttgttcctaagggttgattctcaacccagctctgctcccctggagctagagctgtttatgctcaagagagtaatccccactcataccccaagactggaggcctaaccctaaaactgccttggagtctgtggccagcctggcactggcaagttttctgaaagtctgaatatctccatacctgccatcctgtgtgtaaccaccatgccccagcaagaccctctcacggtttgggtgcaggactgccccctatggtctgtcttgtgctacccatgccaaaggactttttccacctggatacgttgtttatttcgcctgttagcccagattccttccccgactccaattccttccttgtctttccatcaatgtttggcaggttgaattacagatctaggacatttctaccttagcccattcctccatgtccaaccaataaaggaattttctccacctgtttcaaggggagcctggaagtagccattagacaaatccttgagaattccaaacacgatagctcaaacagcaattgccatagctgatttacaaatgaagaaatggtttacagcagtctaaaggctaaactaggaaattctgtggccacactaggaaggaagaggcaaagaaggagtgggcttacttacatgagttttttttttttttttaataagaaaatgaaagtaaaagggcattgggcattccttcattctttcttttgacaaccatgtaactgaccaccaaccatattccaggttctatggtggattcaacagggaacaatatgaacaaggtcccgaagagccttttggagtcatagatcagttggtttcatccacaaaggaagactggaaagaagaggtgattcatatgtgagaataaaaccaaagccaaacctgaagccaatcattcagagagcccaaggcacaaaccaacaactctgaatcaactcactgagtccctactgtgtttatggtattcacctccacccctaggacaccaggtcctttcctagaaaagcttctcccattcatctgattgcttccaactaggctgagaatcatctcagcaatacacaagacatctgcacctccagaagctgcagacaaagtcaaaggtactgcccagtcctgccctgtcttctgatccaattctgaacccacctagaaacacaaagctagggggattttccaggtttctgatttcactgcaaaagtgcctgtgtgcctcagttgaattgtgtaggtaatttgactttaagatggctttttgaaagaataaatcagtgacacccaataatttctttaaaggaacatggaatctaaaagaaccaaaatatagtattagccaaagaaggcactcctcagccaagccttccatttggggttctaactctttgtcagaccttgggacatcagagattgctcattctaacttcagtacagcctcctgccctgagaaaggaaccatcagaacattcaatcacttttatagaacaactgcagtgacttaaggtgtaaatggattggaaacaaaaggcttgcattttccttgatacacaaaaggggttaaaaattaagaggaagcctgtagggaagggtttttgctgaatctaatgcatttttcaaaacactctaaaaagagctatgggcccagagccagctgagctcaatctcctgaattttattttaagcagatcaagcttgtaggttatactatttatactatttgccatgttttccatttagacaaaaatcccctagaatctacaggaaaggaaaaggaagcagcattttatggctcacgcttgcaatggctaactggtttatagaaagactgtgaaggcatttggcttcaaacgacaactcttgggagtccagggtcagcaaggttcctggagggtgatgggctgctctgggcactggcatgaagagaagccacagtcagccaactctgacttctcttaggctggacatgaggacagagccagaaagccccctggagcagactatgtcccatctccttgaggcctgcaagaacctggcttagtctgttttgtgctgctataacagaatacacagagtgggtaatttataaagagcagagttatttcttacaggtctgcagactgggaagtccaagatcaaggggcccacatttggaaaaggacttcttgctgtatcattccatggtgaaaggcagaagggcaagaggagccaaactcgcttttgtaacaacccactcccacaataaggacacgaatccattcaggagagcagagcccccatgacctaatcacttcttcagggttccacttgcaacactattgtattggggattaagtttccaacccacgaactctatggtttgaatgagaaaacaagaaaaccaaggcctggggagggaaggaactctccactatcagagtctgttagtcctggagctggacttaaatttgcttgtgtccagagggaagcacctaccccaagagcatcacttggaggactttgtgtgggagctgaggctggtcctgggggtgccaggagaagaatcagaaggactgggcttgattcccaaccccaccaacaataaaggctcaggcactttattaacatctttgggcggtttcctcatcagttgaaaaaggaagatagcatatgcagagtttgtgtgatgataaaggagacataggagacaaagcaggtttgcccagacagtgcccagcacagagtggtggtctgctgctgtgagtgccatcaacccacttggggccctgtggccttggtccctccaagggaagctccatgctcaggctttcccacctggtcttaaacaacaactaaatcactttgatttcatgttgaaggcagcaagaaaaagaaaatctctgcctagcttctggcttccttgtgacattagccttcgaattaagtatatacaaaaatcacacagtttaaccacaagaaaacctccataaaccagtccacatatcctgaacaaaagtgctttcaaatgacagaggcatggttaaaaagtttactgagaataactacacttcataaaaagcaaaatccgtgactcaaccccactcacagagtggggatggggacagaggtggacatcagcggccatagattgatcaaatctcccattattccaagcaggcagaacccagggaactcaggttgggacaaagagcccattagagggcaggagcttggaagagaggtcagcacagagatggggagcagagaggcttggcctgggacactcacaggggagcccacagatcctgctggatgccggtcacaggaagcatcagggaacatgacatatgacaccgggctttacagatgttctgctgaggagctggagaattgtggctacaggagaaagacacatttgggacccagaaaattctttttatgatgccaatttcaagagtaaggggagtctataaaacatgcggggggctctggtttctgactccgctgtgcatacaagtgtgaaatagaacagtgttttgtgctaggtggagaaaactgcatgttcagtccatatatcttggctcataagtcatttctgtaggatcgcccagccagctgcatctccagccaacaaggccttgcactctcatttctaaagcttgtttaaatgaaatccatagattcccaagtagtgtctcttgttcctgccttagacaggtgtagtctgcatccattctgttaagcaacttggctgtacttacgtcatctcaaggacctgtgaggtgttatcactgccccatttctcaaatagggaaatcatgtccacaggaggagggacttccttgaggttcacagctagtcaaggatggagagcaggcctgttaactcagctgtgcccacctctgaaggtggctctgctctccttctgccgatgttccaaatgggacaggtgtggtgacacggggaccacagaaggccaggtctgtctcctgagatggctggtgggttagtcccagccatgctgagtggctctggcttcaggggcagagtcattatgccccagctttagtaaagggatgcatcaacccgtccccatctgataatttgataatacacaggaaaccaatgtaaagtcagaaagttgccaaaacagccaatgcttctgcatcctgggtctgaatttacatctgccccaggaacctcccaggtggtgacgcatggccagcaccatctgtttcccagcattctcggctccaggtgtggcccatgggccagcagcctgagcagcggctgaagcttgttagactgcagacccccagtcctgtgcagagctgctgaataaaacccccaggggatttgtgagcactgtgaagggtgagaagcactgcccaggtggcacaaagaagtagaatgccagctttgtcccctgagatacttcctgtctgggcctccctggttgggcttctccattgcagctggctacatggattcaagttctaggaaggccagtgagactgcagagaagttactcaactgcgcaggacacatttcctaacctgtaaatgagaacagcagcagagcctatgcatgcggattcttgggaggaatgaatcaggacagggcgtgatgtagccagcacagtgtggatgctcgctgcccttctgactgggacatgtgctttgctgacacatgcagcttggttaaagtcacagcttactgacttgaaagtctttaaaataattttataatctctgctatgaactcaataggagttcattataaacatttcatccatttatatttcccccattgccaatcccttgtggtaactgttatgaactgaccaggttttacacgaactcatgtgccttctggtgcctgcatgtgttcatgaagctactcattcaggtgcagatgcttacagaggactctacggtgtgtgagttcctggaactcagaatcaatgaagaaactccctttactctcatgatccaatcaatgatagagagtgatgtggtgtaggattaaagaagctctggtctcccagggtataaagaagctcctagcccaacccagttgggagagagctccccagagggggctatgctgagctgtggtcttccggagctgaagggtgtgtttaacccctggggacagaagcagggaactcctgggggccatgtccttcctccacccctatttcttgttaagagaaacccagtctcatacattaagccgagaatggggatacattcatttgttggagaatttaaagaacaagatgttgtatttggacagaaagaaatggctgttttttgagtaaggaaatctgacacaggccaccacatggatgaaccttgaggacatcatgcttagtgaaataagctagtcagaaaaggtcaattctgcatgattccacttatatgagggtcctaggggagttaaaattatagagacaggaaggctaatggtggttgccagggcctggggagaggcaggaatgcgaactgactgtttaatgggttcagagcttcagttttgcaagatgaagagttctggagatggacagtagtgaaggttgcacagcaacaagaatgtacttaatgccactgaattgttcacttaaaatggttgagaaagtcaattttatgttatgtatattttataatttaaaaactgggaaaaagaaatgactgcctatgatatattaaagtgaaaaaagagagagaagggggagtaaaagatgcatgctcttattctgatcactcaattaagtgaaatagtataaatcctcaatttaaggtaaaaattactccttggctttgtaaagagtgtcagactctgagacagagagaactagcttcctgtcttgctcttacagttactggctcaatggactttatctttagaacattcagtctcttcatctataaaatgcagcaaaataatacacaggtttttgaaacctttggttagatctcattaaacactctgtgcagcctggttcatcctgcaaactgcagagaaagaggtttataaacctagatgacagagcaggccgtgggcattgcagaggagttatctggaactctcagtgaatcccacaactcataaataatattatgacaaaaactctttcagtcattccaaaaatgtgctgctatcagaggtgttattataatttttttttaacttggatgtccaagaggggacgggcagttcttaatgttatcctttaatgccttagactggccaggatggtgggacacccttgctcagtgttggaggctaccatgtgacagtacaggctaaggctggcctgtccccatatggacttgtgtctgctattaaatgctgtcctcaactttaacctttttcctagatgagctttgtatgagttttctattgctgcataagaaaattactccaaggcattagtggcttaaaacaatacttattttgcttatgaatctgaaagtcagacaatgtggcttatctgtgccttatgtggcatacgttgggttggagggtctacttccaggctggctcgttcacttggctggcaagtggccactggctgtggaccaggagttcagctggggctgggcacttgggatcagttcttccacacgtaggcccctccacaggctgctggggctttctcacagtgtggtggtagggctccaaaagtaactgtccccagagaacctagcagaaatgcatgacaatattatgacccagcctagccttggatgtcacatggtgtcacttcctccatattctattactcaaagcagtcacccaggcctggttccaggggagaggtcataggtgccacttctagatgagggaagtggtaagattgtggaaaggcacgtgggacagaagatactgttagggccatctttgaaaaatacaatctgccacaagttctgtcctcagctgggaagagtgccacccctgtctgcaagttcctcaagtttccctaacttaactttgctaggaggaagggcctgtttggccaaatacctaatgccttcctccccttctcagagggatgtgaataactttcctgctttcccccaaatcttatttctgctgagaatcaggagtacagcttcctgttagtgtcacttcaccaccatctccattaaacatccttctcacttggtaatcagttttccagctgcagcacctctgagatcactccagaaatcatgccctctgctcccagtgtggggacctgtgctaatctgaggcgggtcctgaagcagcgcctcttggacctgcttctcagacactccatcagaagcaagacacagtgcctcccactccggcagctcacccaaatgaagggcccctctcccttcatctagcactgcctggcccctgtcagacctcagccatcaccactccccatggagccagagctgatagaagtatcagtccataagccattcagacatgcagacagacacaggcctgggaaactggacttctcaagtcagtgacgaaagctctggtgaacacagctgaggaggtgctgtcatgattctctcccatcccccaggagaggaaactgaggcctagggagggttaatgatgtgttcatggttacagctggaacatttcaactaaaaatttttgaagttgtgtccagaatgtttcctataacattctgactttccagaaaaaaatgtaattgctatatttctcatagtatttatcttatgcatcaaagtgtgatgtaagagtaataaaaaaggaatgaactattgatatatacagcaacatgaatgaatcttaataaaaagagtgtacactcatccatccatagaaaactccagaaaatgcaaactagtgaatagtaacaaaacagatcaatgtttgcctgaggatgggggcataagggtgggagaaaaggattatatacgggtgcaaggaaactaggaaatgatggatgtctttgttatcttgatgtggtggtgatttcatatgtgtcacaatgttaaaaattgtgcattttaaatgagcagtttattgtatgtctactatacctcaaaaaagctattaaacatgaataaaaattattatgtgaaacagagctaaagttattttacagccatgaagaaatcaggattcctttctataaatatgtttgaataattttaatctggtgaagatttgtactaatttcttagagaaaggaaaaacacaaataaatgatgaaaatgtaaataaatagtttttgctaaaaggagaaattcatatgccaggagcttggctgtctcttaatcaaaaaaaaaaaagacatatgtcattgtgattttgccctaaattaaattgaaaatgtcattttgtttcatcatcaagactatcatccaagggagatgtttttgctattgtgattttgcagattgaaaaaccgagtctcagaaagttctaggacatctccgtggcaaagatgggattggaccaaggtctctgtgcctggttctaaaactcactctttcatccatagcacaccaactcttttcaaataaagagaaagagggaaggaacagaatggatggagatatgggggcccttttcttccaggtgccccaggaagggaattttggagtccactgaaataccatcctgggaaatggagacgcagaggggttgcaccatccttgtcttccacagtgactctcctacaaacacctctcctctccttcccctctttggctccagaaggagccctcctcagttggcctgaatgcagccttctggtgggagtgatgaaaggctgtgacatgctctctcctccttcctccttattttgatggcaagaatagagaggaacattagagctaaaggatgtcttcttactgcaaggcccctttgattctggaggagccaaaatgtaccccaaagacaagaaactgaccatcccaaaggtgtttggtctggagaggcaggaatttcagcagggagattttaggtagacattagcaatgcagggccagtggatggaagccaggcagcaacttagggctgatctctatagggatgaggaggccacaggtgtccacagtgacatgagtgtgagctgcacgctgccattaagtcttccccagggcagagagagtctcaggcatctctgcacagtgactttgcctgttctttagagtctttgtctgttcttaagagtctttgtttcaggttcgatggccgagaggtggaagtctttctagaccctcctgccaaccggaaagggttcagaagtggggctgggtacaggaggagcagaaccttcagagacagcacccaaggaaccaggttggcctctaaagagcacccccaaacgctcttcctcacagctttacacgcctgagctgtgacattctgctgaaaagaaagggatgtggtgtgattaaaatatatttgtgaaaggttggattaaacaatattaagcaagcttccttacatcatatacacccatgagagggatgtgatgcacagcactggagtggctactgtaatgctcccaccaccaccacctttatcaccatcaggaccaaaagctccaagctactgagggagctactggcagtcagccccctgtgctggccatcacagaatggtttcagctaaaagactaccttgagagtcaccttggccctcactcaacctcttccgggaaactcatgtccagtgattggccaatgcagggtatgaagtcctgtctcctcacctcgcctgccaatgctgtggggctatccagctttagagctctctggggaatcagcaaggccgctgttgcaactgcatgaagccacatttctccctctgcttctgttcctttcacagttgctgatctgagagcatccccaggagatctcctgtcttgaatcttggtatcagattttccttccagggagcccagcctgcagccatcctgatacccaatttggagagtgttctaatatttgactgtgaggtgatttgggctgatgtttctagataaatattgctaattacatgagaaagttacttcccatcccatgttcttgtagtaggagctaaaactgaattttagcaaaaaccttttggcagctagcaagatggtcatgggcctccctttcctgcaacctgctgctgtgagagtatgaaagggatatggcatagccttcctttcctttgcccagagagttgttctttgcaatagaagaaacaatgtccttagttcaagtggatggtggggagttgtctcagcagaagatggagaaggtccccattggcagcaactgccagttgctcccacttcccattccctgggcctgagttcagcctccagcagaatccccgcccgggcttctgaccattgagaggagatgtggcccaccaacacgctggagcgaggcactgttttgagaggcagctttcaggttctacagaatgtcaaaacttaccctcacaaaatgactgggacccaaggcagctgcctgaccagcctggcctctgaatccctgctcttcactgtatgggccgcagggaacccctgagagcctgccctgtgaccatggaaatgtatcttcagcccatccacatactgtgcagagtgtcgtgctttataaagcatttcaccttttcacctaaaattaatacaccttttatttaagttgatagaaaggatttagttggctttttccaaaaccgcaaagaggaggagtgaagtcctctgggggatagagccagggcctacagactgggagaagttggggaacattcttactgccccgcctttgtagcaaaaaagcccagactcagggaagtgatctcattggctggaagtcaaactgatggacttgaaatttgaactcaggacgtctaaatctataacactataaatctgtaacacccctaaagttgacaattgtgcattaggcatccagaactgtctaagtctgttctagctgctataaccaaattccttatatagtattagttgatttttaaacaacatagattttttcacagttccagaggctgggaactccaagatccaggcactggcatatttggtgtccggtgagggcctgtttgttatagatagcgccttctatgtgtcctcacatggtggaaagggaggccaactccctcaagcctatttcataagggcactaacctcattcacgaggactctaccctcataaccgaatcacaaccgaatcagttggagcccaaaggctccaactaataccaacacactggggattagatttcaacatctgcattttggagggacataaaaattcagatcacaacaaatacatatatatcaaaaatatacatatattttggaagtttattttttcctgtgaattcttcctttttattatgatatacaaatttgttaacatagagttatagttttctcttttacttctaaaaataatctcattcctaattgtctgtgtttgtacaattcttccctgtgcctgttgacttccttgcttagacttaccagttatgctccctttgctgctgtttttcaaagaactgggatggggcagtatttgacttctccttgtgcccaggacctagactggtgcccagcacaaaatgttctggtaaagctactggagtaaaggaatgaatgggtggggcaccttggagggaaatggaggtttctggctctctttgttaccacattgcctaggaaagtgtttctctcagctcccagcatcacggctggagaaacatcttacatgttcagcaactggctctgcccttctctcagatggaaggtctgactcagccagggtctgggtcttggtctttagtggtaaaatgttctctcttacaacctagagtcttgggggtgatggtcccaaatactgtgggcagggagggaaaggacttctgtgctggggcaaggatgctggactctagcctgctaccttgctgttaccaaatgtgctcctttgtcattttgggcccatctgaagggctcccgagcttgagcctcatgcagcacccaaccaggatttagataagacgaagacgatgtgtggagggaagcccaggggtgggcctgcaggagatcctaggcacttcaggacaatgggcatctcctgagagagaacgtgctcatgagaagagggtccacacatacacttgcgaaaggctttcagagccatggtggcctgaaaacagggccttggatcacctcactggtgccaggaaggaggaaaggggaggacacaacagtctactttccacagcaaaaagcatccacagagcccctcgcagtggttcatgcgtccatcttctttactactcctggctgcagtgaaggtcagaaaatgtagtctctcagctgggcacatcactgtcccagataaaaataggggtgctgttaggaagcaagaggcaggcactgacagagcagcctctgccgcctccactttttcagctgcccgacgttcacacaggctgttcctacccaccggacacacgcctcacatcctccagggacaccatccccaagtgccatcagctgccacagccaacccaaaggcctgatctgcatgatgggcggctccctccctcaggtatcacgtggccatcttctccagctcacctggtggccttgtgagccatacacctaaggacaagtcatctcacccagcaccctccatataaaggacagggaagggacaggacaaccccaacaaaaactctcaggaaaacttctgaaccactgctgtccatagcgatgatcaaatcctgcttatcggaaattcgaatcccttctctggcaccggagtcaattccaggttaaatggcaaggtggggtccccctcgtccatggtctttgtgatccctggcacctctccatgggctcttctgaaatggggagtccccttcttcttttaggaacctgcacacctcctgttggtgtagttcaggggcctgaaaacgactttaggggatgaggatccaaagtccccatgttcctgtttagcagacggtgctctagtgttgcaggttgggtctgagccccctctccctgcctctgaccacgcggcctctttctcagctcccgtgagcttctgggcactgctaaggctggtactgccatgcaatgtgggatcagattgaaccatgtgaaagtaccgtttagcaggacaaaaatggtcaaatggcaataagttccaataattcaacctagtacaaatgttaacctattgctgagggggcttcatttgaaactggatttgacacaaggagaaaatacaagtcaaatatttaaacagtggccgacacattgcaagcaatcaatgaatagttattgattctattatcagtagaattatattaatcaatagagtgattgatagactctattattgatattgtcattgaacacacaacattaatcaatgttattgtggaaagtttaactggaattggtgaaaggtattttggactccacattgtcctggttattatttcctctccgccatgtccagggttaaacagtgccacatttaaccacagtctatagccacactcaatagccagtctatcgagactgcacaaattgaactctgttatctcagactttgtcacattttttcctagttcattctggctgaacgttagactcctttgggggtaatttttaaatgttgaatcagagtcttggaggtaaggcttggatgttagtgtgattctaatacagggcaagaattaagaaccacagacctagctgatatgtataatctattattcttttgtctggtccatcaatgctggtggagggcagagatgcattcgccagagcatccaggagcactcagcaggagaggtggggatggttgctagctaacgtgggggtgacttctccctggttttgcaagaagctacccctgggagagaactatgggctaatgcaaaaggtgacagcaaggctattcggcactcattatatgagtgtgtctcaattatttatccattctattgttgatgacattgggattatttccagtttggaacaattgcatggaactactatccatgtctatttttgtagatataagcaaaatcttttattactacagattcacacatatattttttcattgttacacttcttgatacataaattatctgaaatatggtcaatgggactgccttaaggctggcttctgtattcttttgacgtatttccagtattattcaagcactttcttactttctgacataacaaagtgctccagacttattttctttctccaggcctataattatcgatttctccaagaatatctgactcatttcagtgaaaaatggtatttggaaaccaagatttgggttactagatagactcattgctgctgttatttgtctttttggtaggcagaacttggaggtgtggatggatgagtgaaagggatatacctaaaatcatgaatttatagtgatatttctaattcaaatttaataaaatagggtttttccttttagtttttacttgtaccttcttttccttataatgaaagtcttagttctcaatattagtgtatttacccatttgttttctcttataatatccacaatgtttcttgctccataaaataaatataatcagtatcttgtgattcctcactatgtaattcggtgcccctgaacttctttgtgcctctcctaaacacagcatgccttttagattttgaaaagttttatcacttatgccttgctctgcaaatacatctttcgtgattgatttgtatgttgattctgaaaatcaaacacaaatgactagcatttttgttagtgtgatgatgtgttaagttgaatcatatgaaaattatggcaatttcctatggtataattagtcatttttattagagaaacgtgcttaaaaataagcttattttcctaggtcggtgaatgtttgctgttctatagatagtattccaaagtttaaagtcaaacctattcccttcttaaatgctattgattacacaagattataccaagattagcttgttgtgtgtttgtaccataacttttacagttttttgttttgtctggagaatctgattaccttttcatttttctttatagcagagagatcacttgccttctaaaccatatttataagacatttgagcttttaatcatacttgttgagtgcattgatgttttagccaggcacagtagtttctgcctgtaatcccagcaccagcacttcgggaggccaaggtggtaagatcagttgaggtccagagttttgagaccagcctggccaacacagtgacacctcgtctctactaacaatacaaaaattagcccagcatcgtggcgcacaccacacttgtaatcccagctacgcaggaggctgacgtcagcaaatagcttgaacgggagaagcgaaaatcacagtgagccaatattgcaccagtgcactccagcctgggtggcagagtaagatcttgtctcaaaagaaaaaaaaaaaaccggggaccttcgcagtgagtgttacagctcctaagccaagtgttacagctcttaaaggtggcatggacccaaacggtaagcagcagcaaaatatatcgtgaggaactaaacaacaaagctcccacagcgtaagaaacaatcctagcagcttaccgctgctggctggtgtgggagtggggcgggtacagcttttattcccttatttgtccccacccacgtcctagtgattggtccattttacagattgctgattggtccactttacagattgatgattggtgcactttacagagtgctgattggtccattttacagagtgctgattggtccattttacagagtgctgatcagtccacttacaattctctagctagacacagagtgctgattggtgcattgacaatcctttagctagacacagagcgctcattggtgcatttacaatcctctagctagatagaaaagttctccaagtccccagtagaccaaggaagtgcagctggcctcacctttcaacagcatgaaagggaagagaggagagagggccaggacaagggagttaaaggtcgccagctgccggttatccttcccaagccttcccggctgacctgaggggacctctccacatccaacagcccagtaccacctccggtagcctgaaatggaagccccgcttctgcctaatggaagacagaagctgcttccatttcagcttgcttccaaattcaaagcttggctccacaaaatcctgttttgcattagaaactcatcttttctctcctgggagcctggccaggcctgtgtcccagaaagggaaatggagacactgggagtgagacccgaggttgatggagggtaggcggctgcctcctgagagtagggcgaagggcagagggcaagcaggaggaggagcccgcctgactcctacatcctcgggatcttgcctggtccggagctgacgggttgaggaccctctgagcacccttcctctcaccaggcaggcgtggcatggcagacctcattacggacggccatcctcgccttggcccctcacctgggaacagaaggcttcgcctggctttgagtgttctttctacaacaaactgcatccacttagccttctttcgtggggactttcgggaaaagagatgacttgaaaataacataatcataacacggatagacttggaaattaaatttgctgggcggttgagtttgagagaaacaactcatgaggggacagactttcaagtgtgagttattttgaccaccacctctcacatccactcatgcatgtccacagtgtgcatcccacacgctcctcgaacaaacgggcatcaaccctggcgacgggagccccctggaaggatggggtgctgtacaggtgcccagccatggtcttgggtagtcctcacactgtggttcaaatcctgtgattctacagctgggtttcctgccctcactacggtcctttccacaaattctctctctcctgcctgctatttctgtcccccgctcatagcagaggccacaaacctcctccatgctgggtccttcctttcttcctctgctgaaatccaccccacggccaaggagaccacgtttatcaagtgcccaccgtgtctcaggcagttctgacacatggtttcacattattttaatctctatgacaattataagaggcaaatatcatgccctgccttctagatgaggagagaggctcagagaaatacctagtggtacaagaacccgacagatgaacgtggcgcaagggtgggggaaaccaacaagacctcgatctctctctttctctcatgaagagctgcactcctccctctccacggccccaacactgcaccggtgggctttctgcttgtggtttttaacaggctggccttttgtcctggcaggaaccattatttatgtcccttagcgaaattcatatagataggtcgcagaagtgaacttcctgcctgaacagcatcagagcccagccactcaggatggaggtagttcctttctgcaaagccttctagacctttaacctgcctccccgagacccatgacaacccagaggcattgctttcttccagggcctccctggcaggtcaaggtgacatgtgacacacccatggacgctcctgggtctcagccatttccacagtgctaatggaaatgccacaactttctcacatatgggggaaaaaatgtccaacggagactcttataagggtgacaattttaggaaaatcctcagctccctcaacaaaccagttagaagcgttcagaaagcagtgctgttgccccaggtgaaggcaggcaactggtgttgacctcctcaaatccccaccaggcaaagaattctccataaagacattgaggtgttattgggaggagaagtgcatgctaggcaggaataaatacataaatatgtactacagagacagaccagggtctcagctgtgagcagtgtgtagcgtagactgatgtggttatggatgtggatggatatgggacaactcttgtgtgttttcaatccactcagatcttgtagagctggtgttgttacccttatccaacaggaaaaacacctcagggctcagcaaggtgaagacatccacacagctacactctaccatttattaacccaacagatttaaaaactactgagtgaatagaaaatgcatgttatagggagaacttgaaaatgtattttatttaaaacatttatttttatttttactttttgagacagagccttgctgtgttgcccaggctggagcacagtggcatgatcacagctcacttctgtttcaacctcctgggctcaagtgatcttcccacctcagccccccaagattgctggaaccacaggcaccactatggccaccactatggcatgcgccataatgcccaacacattttaaaaaaattttgtagagataggttctcactttgttgccaggctggtctcaccagccactccacacctggctgccgtggccctcctattcatcggattccttcacctccctgctgtcctgccccctctgtgatttcagtgacagttcttttctttcctctgcacagccggctcctgaagttcaatagaacttcaaggagggaactgttgtattcagccactcgagaggagcggcagcctttgagagcatccagggacctgctgggcctttcttcacaaactcttgtgggcaaggtgcttggcaaagccacagcctgagctgggaacaggagccaggcaccctgccaaccgcccggcccagtgtcagaaccatgtccaagtaagctttccaagaaacaagttgtggccctggaggcttctctgttcagcccccttcagagaggaggctggagtgagggaggacccccaagtgtgtctgggtctaggcatctctgtggttgggacacagctggcatggtccagggcccaggcagcaggacacagaaatgagccgtgactgattcctgcccatctcgacagggcaaggagtgaggagctttgggattgcacagaggctgagggttgcaggcttcatggcatggccaggggcctcccatatgcagcacaggtggccccggcaagaggccagagtcacccagcttacctggcaggtacacttaagggcatcagagggccactgagggaggctgtcaggggtgtaggcaggtgtgcctgccttcttcgaagtccttgctcttctgatccccgaaactgggtctgccccttcctcccagaggctcatgcctttgccagggatgtgaatgcgcatgagtgctctgcttggagcaggcctggcagagcctctcagtcccccagtgcaatgctctggggtgataacctcaatcaatgaccccaatcaatgaacccagtcaataactaattcagtgaccccattgaatggccccaatcggtcaggcctgcccaggaaacacagccgaaccgagtgccttccctggtttagattctcaaccccccacctcatccaattttatgccaccttcacccccacctcagggatgccaagcctggtgggaagaccacacatgaaaccttattagtcatttacatttcggtgtgaattagattaccagctcctgttcttagaacatttattcatttgataagcacttactcatccatcttctacatcaggttccgtgctggggcagcagcagacagagttgaataaagatgaacaagccatgtccctggttccacagaggctctagaaagagagaagtcatgagcggctgcagctccaggtgcaagtcatggtagagacaccaatgcgtgcatggggctcaggaaaaccaaaggaacatcaccagggaggtgacatgggattaggcctgggaggatggatagcttctgtaggcagaagtagcagacaccaggaatatggcaagcataagacccaatgcagggagtaggaaagtgctggactctgagaaacagctggatgcccaactagttaaacccagggtagacccatgtatgagagaaagggaagatgctcttgggcacagactgcaaatgacctggaatgctaagctaagctgggatgtaatcaactgggggtagcaggaggtcacaaggggtaaggcacagcagaacacaggagaccagcacctgagcaggcagccaagggtaagtggcaggaggtcacataagcaggcaggcagcaggccaagcccaggaggcagtcgacctcttgacacccctgcatttcattccttgcagccaggcagagtaggaaggagccaaagagttacttctgggaagactgggccggagctctggagaccacccttctctacagatgccagcccccaaactttcattgcccttgactctgtttctgccatattccagagcatgtcggttaaggaataggtgagtggagtctcattttgtttttgctttgcttgtctgccctgcttcaatcacctaaactcattagagaatggtcaagcccacagcaatgatgaggaaggcacgcttgcgttttctgggctgtagtttctggatgcagtcatgtccaaggcccagccagcctccggcaagcccgccatgctgcctgtggggtctccctctgccaggaagggcacttctaccctggacagtcccagctgcagccccaccacaggatccctcggctcttcacgctccactgagatttctcaattgactgtaacttccttttcagaaatcctatttggcttcaaagttacagaagattgttctccttggggcctgcagagatgttcaaagtatgcctcctagggatgaccggaatttgcttgaagtgttaaaagaaaaccacaaggcataataacacaactattgtccttgaccctcagatgcaaaaattaaaatcctcattcataaagcaattttgaaaatctcatggaaatatattctctttagagctgaggccaaaaaaaattaaaaatttcctccccaaaaggaaactggttagcttggaatgagagacacaaaaggcacagacagtaagagaagattatcaaggtacggaggccactctaggtctctcaaccccaattccaagacttcatagcccctaacatgggagaagaccagagacccataaaggaatgaagtctggaatataatttctagtggaaaggagtgctacaaagaagggattaaagcgtgacaaggttgggggttgatattgtaggggtcagcgaggacactttgaggaggtcctatcagagaagaaagctgaaggacaggagcaaatgcatggtgctgaaaagagaaggaagagagaaaatggaagatggggctgaggaaggtaatgaagttgaggggaaggcaaagtcaaggtagtgtaaggcaggagtttacaaactgtctctgtaaagagctaggtagggaatatttcagtttggtggccatacagtctctgttatatctactcatctctgctgttgtagcgtgaaaacagctccaggcaatatgtaaataaataggtgggactgcgttccaataaaactttattgacaaagataggcagagggctgaatttgactagagggctggatttgactagaggcccatggtttgccgacctttgttttggagccttgtaggccaggatgagaattttacttttattgttaaaggaatagaagccatgtgggggttttaagcctaagagtaaagtgatgtgatttgtgttttagaagatcattttagctgtcacatggagaaaagattgtaaggcaagagcagaagcagggagaccagttcaaggcttttaaagttctttgggcaaaagaggctggagactgtatctaaagtgtctgtggcaggaattcaagtgctcacccgcatctttagatctcccccttgatccatgatggaacccttcctctcactcctgtgagttttcatgtggccatgtgatcagctcagccaataaaatgcaaggagtagaagaccttaagaactagtgcatgattcagtctgcctttcccctaccatggtggtttataacttctaggcactcatcctgcatatgcaacctggaacttaaaaataaattaagttaaaatataaaaaataaaataaataaattctagaaactcttgtcagtgtgggtccttgagtaaagaacacacggagcagagcctccctggcaattccatggacctgcagtgcacacagagcaagaaccaggaataagatttgtcattttagcccctcagagttagaagtgtctgccgctgaggcatctcccagctcactatgactgccacagtggcaagctgggaggctacattttcaaggtaaagatgacaggacttgctgataagttcgctgtacagtgtttgagaagaagagaaatggaggatgactgccagggaattcgtcctgaaccactaggtaaccaatggcaccaattagtgagaaacagaaggctgggggagggcctcagggtctaataaaaactgtctggtttaaataatggttcattacctactaactttgtaacatgggcaacttaaccagcctctcttggtacgtttgtctgtacaatgaggataaaaatagtattggcttcctagggctgtcaggaggactaatggggataattcatgcagagtgcttagcccaggccctggcaaaagggagctccgcaaatggtagctattgtcactattctcgttgtcatctttattactgttatcattatcagtatcttaagagcttgttcattttgagtcaatcccttgtactcagccagttccaggtaccctggaaagccaagttcttggacttagctgccaaaaacagcctggtctggcatgatcctctcttggttctccctccagccttccactggccccacgctggccagaaccctgtgtaagctccagctccctggctgagcttcccatagccagtgagcaacggtcgtccaaagagagtccaaccctgcttccgcctgctgtgcccaactccagatggcctgagctgtattttcagtgagtccagagtaaggagacatccctggctggcatgacgctcgcactgccttttctcttttctggacgtgcccttacctgggtcaagtggcattacaacaggagttctagaaagtgctagaagagtgtcacaagtcagttccatctatctggtcataaaaaggactgaaaacaggctgaattagatggttgcctttccaagatcagagtgccacatttgaggggttttatagcccccgacgcccacagggccaagtccctactctcccagctgtgtacagccacatccctgaccagcccatgttcaacaggggttcagtgcaggggcaaaaggctcgttcccctgactccctgcctccatttgggactactccaccgggccatgcctgctccccttgtgactggccgaggtacctgttggaagtgccccgtgcccacctcctctctctgcccatgccttctctgcatttcttcccaggaaatttcttgcatgcatagcttagacccagagcctgcttcccaaggaaccctgtccatgacaggctggttccagccacacaggacaaggacttagatcaaagtggcctgccacatgttgatccacagggagggactcaggtctcttatcactttaaaacaaacctatttagaagagaaaaatccttagggttaccctggtcactatattcaattcttgccctgtatgtgctgatgtcttgaggaaattcagtgtctgaggccaccaagtgaggccagccccatagtgcagcagagtcacaggccccaggtttcctgtgcaggctcttggccctgtaaagcaccccccttccaccagcaacattccccctccacccactggtctttatcttagcactgaaactcacttctcaagtgaaaagcacttcctgcttgtgggactcttcattcctgcattagcaggtgcagggagagaatgaggagctcctcccccttcctttcacaatctgagaaggatttagataggtgagtgtgaacctctggaaatgatgtgcaaaattataacaacaggtttttttaaaattggagagactgagagagtgttaattgcttttatcacattcttaaaggcctatgagcctaaatagatgaagaacaatggctgccttgaggaaatcgctgagccgctgagctgcccagcccctggaacagaagagagagcccaccatctccggccttcagcagaccagccacccagctgagagtatttacttttcttttataaaaagttttaatcaaaagcaaactagggtgttgttttttgttcattcatttgtttgcttgtttgagacagagtttcactcttgttgcccaggctggagtgcaatggcccagtgtcagctcactgcaacctctgcttcctggcttcaagtgattctcctgcctcagcctcctgagtagctgggattacaggcacccgccaccacgccaggctaatttttgtattttttgtagagacgaggtttcaccatgttggtctggctggtcttgaactcctgacctcaggcaatccgcccatctcagcctcccaaagtgctgggattacaggcatgagccaatgcgcccagcgtgttttgttttgtttggagacagggtctctctctgtggcccaggctggaaggcagtagcatgatcatagctcactgcaggctccaactcttggactcaagcaatcctcctcagcctcagcctctcgagtagctgagtgcttagagcatttaaaatgcaggacaatgttttgtgagttatggataaacacatgaacatgtaacacttgataacgcacagtgttggccctccttatgcatatgccccaagcatgcccggtgctactcgaccaccccgggagccccaacaggcaggactcatggcctccttcttcctagtgagagattgtggctcatttgggtgaagtggtgcacccatggtaacacatcttaccagtgagagagtccagagcagagcagcccttggacagttgaaggccagctctggccttcagtgaggaggcggtggggtgagggaagacagattggtttcagggtctagccggggcttcctgcctgcatagcccagagctagtagcttcaatctcatacaattaagggcctgctgcctaattaaaccagctagtgcctgtaagcataaggacaagactgtgggccatcagggttagagctggggctcctcccctctggccaggctgcctctctcccctgggattcctgatctcctggtgtgtgcagacccaaagctgcctccttccagtcactgtcgtcaacagccactgtctagaaaggcttggaaatgtccgcggcacagcgcagatgatattctccaaagatgacaacagtgttgcccatccacacttttctgcaatgtgacctcccactgcctcatgggagacagggtctatggctcctcctctcaaatctgagctggtctctgtggctcacttataacccacagtatgtggcagcagtgatggtgagtgactcccaaggtagctcagtgaggccaggcggctcccgcttgttctcttgggatgttggcttcctgggtgttgtctcaggaggctccctttagaacaccagccaccatgctgggagtagtccagacccatggaaatttacctgagttacccagttgacaatcccactctaagtccaggcttgtggtcattccagaccaggtgctggacctaggagtgaagagcctccagcgaagtctggccctcagcccttcaagtcatgtccagctttttgtgtctctcagccgaagtcagagatcatggagcagagacaaaacagccctgttgttccctgtccaattcctgacccacgcaattcgagagcataatgaagtggctgttgatttatgctactaagtttgaggtgctttgtcacaagaggggagcatgaagcacttggcagcccatctccccactcctctctccgctccctctgaaaggtgctggtgaatgcggaggtagcctcttctctctacctgtggtggctccaggaagacccaaggcccaagccatgaggtgctcacatgctcagatggaaatggcatatggggtggtccaagaccccagccggccaggcagaccaagatgtgcagccccagaggctgcttgtctccaacctgtcctgtcaggagctgcaggggctgcctccagccatccagtgtgtggcgtgtaagaagagagaccagtcctgtaacccacctcaaactgcgccatggcccagctctaaacatctggctggagggcaggacacacaggacatcctccatgcatctcattttcccttccatctgggcccccaccttcagaatgcaagaccccctctcacagggtgaagggggcaggagccaacctgaaggaacttcgcaggaagggagggtgtgttcacatacaaggacagtagccttgctgctttacttgctatggtggcccgggcccaggaggtctaggggctaacgcagggaaatttgtgaataagctagatctgagatcacattgtggtgttattattttcttaggtgcgataatgatgttgtggttataatgggaagatatccttatttttagaaaatgagagctgaggtatccaagggtgaagacatgatgtgcaaaacattgcaatggttcaataaaaataaagaagtatacagacaggcagacagatgcacacgtcactgtggctgaaggtaaataattgttgaatctgggtcgagagccttcaggtgtttattgtactattcttttaactttgtgtgtgtttgagatgtttataaaaatgttgggagaaaaacaaaacatgtctaaagttgatggatagcacgtcatgatgtcgcttgaagattcccactgttatctccgccttgcttgaaacaggaagaggaaaacagaaaaaaatgaaggtagacccatgggaaggcccagagcataaatattttcagtggatgattgaaagggaacccctctgtgtgtgtggttgtgtgtatttgcgtgtgcgtgtttgaaaatcagaagtaatttggaattacaacagcttatgaaaccaaagctcttcacacacattattacatgagggaccttctcctagccccacctgggctttagaaactcccttcgtccaccgtccacaaccaccgccccaacttactttggctgaatgaatatccccacagttttattcattcggtgtctgatccaatgaccttaataagatgtatttcagtgttaatcaaagctgttatgagatagttattagcgtgtgcccatagtaattttcctagtgatttgaatttccatgagcactgaatggttatgaaatacaatatttaggaaatatatatcaatgaaggcggcaatgtccacaggttgtaagtcaaccactttattaggagagataaatcaagaaagactgggtgaaagaccaaagacagcaaatgattacagcctgcgtgaaggacaggggagtttgtgcatgtgagcgtctatgttatgcacacatggagcactcgtcagtaattaggtgtatggagtgtagaccttctcgtttctgatgtgcaagggaatattaaaatgcatgaaaagtgcttttaccacaaagttctattaggagatgtaattaatgtgaaagacacatattgcactccctttctcaagcattaaaggggaagactatgctcagacctggagatgtcgtgaaaaacctatacccctcaatcatcttaagaaactgggggtgggccgggcatagtgggtcacgtctgtaatcccagcactttgagaggccgagtgggtggataacctgagctcaagcgtttgagaccagcctggccatctccactaaaccgcatctccactaaaaatacaaaaatagctgggcgcagtggcacgtacctgtaatcccagctactcaggaggctgaggcaggagaatcgcttgaacccaggaggcagaggatgcagtgagccgagattacaccactgcactccagcctggatgacagtgtggagctcggtctcaaaaaaaaacaaaaaacaaaatgaaacaaaaaaactgggagagtgtgtgctgttttaaaattcaggttgcttgtctccaagccatcccttcaggagctttagggactgtctccagccacctagtgtgtggtgtgtaaaaaagcatatcccatacccagcctctaaccccagcttttgggatgcaaggcctataatgtctcacagggtggaaggggaagtagctaacctaatggaatctggcatgaagagagtccttcctggatgcaggggctttgtccctccaatacctgctttctgcttctcaaatttgggcttcaggagtgtggcttgctacccactgaaaagcctgcctgctgtcacagagacatctttatgggcccaagtctttacagaccctggacccagggtagggggcatttcagaacaggtatcttaggcacaaaaggtgtaattcccttcttgagtgtcaggccatcctcatctccatcctttcaaccagctggccagcatttgggaccacgtttttcagactcctctagctgcagctgcccctcgctctcacccttaccctcttcgtctttgggagcattttcaaagtatttactacataaagacatacatgcaacatgcacacacattcacttcaagattaggagtaaagaaacaaataggagcccacgtgttcaaaatttattcctttcggtgggttcttggtcttgctgacttcaagaatgaagccacagactctcacggtgagtgttacagctctaaaagatggcgtctctggagtttgttccttcaggtatttagatgtctccacagttttttctttcccatgggttcgtggtctagctgacttcaggagtgaggccgcataccttcacagttagtgttacagctcttaaagctggcacacccacagttgtttgttcctcgttcctctcggtgggttcacggtctcgctgacttcaaaaatgaagcagcacaccctcacactgagtgttacaactcataaacgtagccaggacccaaagactgagcagcagcaaaattcattgagaagagccaaagaacaaagctcccatacagtgaaagacgaccagacctgggggccgctgcgtccacagtggcccacttttattcccttatttggccccacccacattctgctgattggtccattttacagagagctgattggtccattttacagagtgctgattggtccgttttaacagagtgctgattggtgcatttacaaacctttagctagacacagagcactgtttggtgtgtctacaatcctttagctagatagaaaagtccccaagtcctcacctgacccagaagcccagctggcttcacctctcacaagtagggtgggggctttggttctggctgtgctacattttaactgtccacctcataaccacccaggggattccacctccctgagccttagtttcctcttccaaaaagtggcgaggcagtcatacttgctgcgtgtggttgttatgaaagttagctgatgtgaagaagctctggccctgcctggtctggcataagccagactagcacccgtgtggaggtgtcatgtcacagatgcaacagtccacagaacttggttataaaagcaaagggagatgttttagtctctgtaatggatcttagagcagagatcttcagatggatttgagatccataaatgtaatagtaccaagtcaaagtaacttagtcacttgcagtttaagactccactctttcatgttaatacagctgcagtaagccatccttgcactgccataaacatctgaaggctgaggcaagaggatcacttgaggccaggagtttgagaccagtctgaccagtatggtgaaaccctgtgtctacaaaaaataccaatactagccgtgtgtggtggcacatacctgtaatcccagctacttgggaggctgaggcatgaaagtcacttgaacccgggaggtggaggttgcagtgagctgagatcaagccactgcattccagcttgggcaacagagcaagactccttctcaaaaaagaaaaaaagaaaacaaatgaaacacctgagactgagtaatgtataagaagagaggttgaattggctcacagttctgcaggctgtgcaggaagtatggtggcatctgcttctggggaggccttggaaagcttccaatcgtggtggaaggcagtgacggggcaggcacatcacatggtgagagcagaagagaaagaaggggcggggtgggtgccacacacttttaaacaaccagatctcctgtgaactcagagtgagagctcactcatcaccgagaagacagcccaagccactcatgagggatctgccccatgatccaaacagctcccatgacccccacctccaacactggggattacaatttaacatgaaatttggaggggacaaatactgaaaccacatcaacatctttggtgaaaacccagggattctctctttctgttctccttcctctctgactcccaagcgagggcagggcactgggatcacttcctgtctggcttcctacccctagtgggatgagtccctgatctcacctccttcttgctctttggatccctcctcaatgtgggtggtctgtggggtttgtcctggggccactaagagaccccttgtccaccagctcactggcatgaaagaatgcaagagcctctggtggcaaccgtcctccacatgggaaggttgttgtgtgtcccctaccactgagctaggacttcagcccgtctcccagtaaatcttgtgggacaccaggactggctttatgtgtgggtaaccagcacaggccacaggtcctgctctcagaagggccctgaatttggggcttaatgcactgcaactgctgagtgccctcaggaaggtcttcccgatctttgcacctgtgtttcctaagtgaagtcagatagacgatagagcatacaccgaggcacagagcctcggttcgcacacagccccgctacccattgccttttcctgcctcccaggagaggttcttggccatctggtcacctgccccagcatttcggatccttcccagacacccctttcccacttccaatcagcaacagctaccaacctctgctcctaggggaggctgggcatgggggagggctgaggtctggtgtggatggcccagagcatcttagggtggggtctggcagtggcacattccagctgggcagcactattgtgcattcaggaggtgacctggcaggtgtaagcccctcactgaccccctaatccaggaactagagcaccctgttgtgaagattgcaacatcctggggtctcctacccactgtgagttggggagcaggcttacggggagagaagacaaggggctcactgtacccatgcctggctggggcatggtgcatcagttctgtggctggtgggagtgggaacaagctgggagggtctgcactcactccgactgtccccatgcctaagggagaaggagattcagtaacaaacagaaaacgtcataaagggaaaaagagagaggtcgtgaaagagaaaaatctttactttttttgttcctttaatggccctttttctgctttttgaacaagaggtctgcattttcattttgccctgcccctccctccccccgttaatattgctggccctctagtaaaccttataaaccctcttcttctctcaagtgccatgggaattcctggttgaagggagacgtggccctacattccctgactgaagctgcttttgaagacaattgggaaggtcctcaaaaagttatacattcagttgccatatgaccaggagtttcagtcccaggtgtatacccaagagaagtgacaaaaaatgtccacacaaaaacttgtacatgagtgttaatagcaacagtattcataatagtaaaaaagtgggaacaacctaaatgtagatcaactggtgaatggataaatgatttgtggtccgtccatccagtggaatattattcagctcttaaaaaaaggaacagagtactgacatatcctacaacacggatgaaccttacaattgtcaggctaagtgaaagaagccagacacaaaagcctatatattgcatggttttatttgtatgaaatggctggagtcagcaaatctatagaaacagaaagcagataagtggtttcctacagctggggcttgggggattatagctaaggggtgcagggttcaggtgatgaaaatactctgaaattgacagtgtcgatggttgcacaatgctgaatataccaaaacccactgaattgtacactttaagtgggtgaattgcacagtaagtaagtggataaattgcgtagtgagtcataccttaaaaagctgtctttcaaaaagatatgtgcagttttacttgacaagcttgttgcattatctccccagcagccctgctgctaaagggcttacgtgcttaggaaacaactggacatgaagctctgacctccccatgcccttaccacccccagccccagaagtctctgtcagtatgattgcttttgtgttgattctttctgcttcctggaaatctagccaagcccaccccccactggcagaggcccagtgtgatggggtgtgagtctgtttagaggctagggcttgccagttgccccaggacatgtctgaccccaaggtgtgagaggagcctgtctggagcccactcacactgctctggcccatgtgctctgtgcaaggtcacacttccatgcctaaggtcacacactcaggcccctaatgctggcaaagcagaggaggatcagcgtcctgttcagcagactcctggcagttcagaccacatgatgagggaaggcccagaggacaatgccaaggccccatagtaatgacaggtgaagccagctggacttctggatcgagtgaggacttgaagaacttttctgtcttaaaagaggattgtaaaattcaccaatgagcactctgtagctgaattgtaaaacgcaccaacgagcactctgtagctggattgtaaaacacacaaatcagagctctgtaaaatgcaccaatcagcgctttgtaaaatgcaccaatcagcaggatcctaaaagtagccaatcacagggaggattgaaaaaagggcactctgataggacagaaacggaacatgggaggggacaaataacagaataaaggttggccaccccacgcccccatcaccagcagcaaacttgttagtgctcttgcacgctgtggaagcttccttctttcactcttcacaataaaagttgttaccgcttactctttgggtccgtgtcatgtttaagagctgtaacactcacggggaaggtccgcggctccattcttgaagtcaggcagatcgggagggttatggcaggaacagactctggacacagtaagatgatcactcattctcagaaaaggatgcagggtccctcaggagattcagggccacaccctcccatctttggggatgtcacagtggcttgcagattgggtggaagaaataagtgcttgctgacttccagggaagctgggctccagactcttctctcttaattaccaatgcaagtctgggcttcccctcttgggaatcctcaccccgtccatgcttcgtcacaaccttctgtgataggtgatgaggcaccacgcagggagtactggacagagccatcagagcagcagcactagacgccatgcaagggacatcacccaggcaatccctgaaggcagacagggagacttctcaactgcagtgggtgaaataatctcccccacagcccccgccaaattcgcattcttcttggagtgtcagaatgtgacctcatttgtaaatatgattgttgtagtataattagtaaagccgagggtatagtggagtatggtgggtccttaatccattacgactggtgtcctcacgagaaaacaaaaagaggcagaaacagacacacagggagaatgccaagtgacagcagacgcagagactacagcgatgtgtctgcaagccaaggaacgtcaaggattgccggcaacaccagcagctgagaggtgaggaagggtcctcccctgtagacttcagagggggccgggtgctgttgacatcttgatttcagacttctggcttccacactgtgcaagaacaaattcccattttttaagccacccaatttgtggatatttgttacagcagcccaaggaaattaatacagcagtcttcattcctgaagcaataaaatgagcgcagactgcagcaattattaattcagccaacattgatggaacacataagcatcaggctctggactgggtgctgagaaaagaggtgaacaaaagacgtgatgtttctctactagcaatttgcccacaatagccacagaaaaacagatcattaaaaattgtgataagatctatgacgtaacatcatggggaagtgtggttgggatgtgggaagccggaaaacctcccggaggaaacgtcatttattccactgagacctggagagagaggagatggagtgggaggaagacttactgagtaacatgcatgtttgtgtcatgttaggactttctgaccttgctcttgaggtagatacagtaaaacactaagggaggcgttaaccacgtcaaatatcggggaagtgcactgtaaagaaggagctgtgtgtgccagtgcctcaaatcaaaaaggactggagtgcagctgtggaagtgagaactagagagtctagcgagggagccggcagaggacgggacaggacctgtgtgggggctgcagaggcggtagtgggtctggtaaatataacaggacaggatcgtttccactgtccatttcccttccatcctatacttaaaggttcagcatgggcacagttcatcagcacggggctcttcccagctgatatgtccagatccacaggagtgagtgtgagcaccagggccctgctggcacacgcagcctcccagcctcacacgcagccacctggagtaaaggcttggctttttaactctgctgtgcaatagttcatggttgctttaacacagtgtaccaactctgaaaagtttaatggagccatcttcgttaacatgtgtctctgacctactgttacttggtaagtagtgcattctccaattcataaaagctgaatttgaaattgtcaagtccccagattacagctgccaaactgcctccattgatgtcatcagtctccaacctgactgaaagcaggaacaccttcgtccctgctcagtgcatagcatacacaatgccacaaggcctccttcatccccatgtcctgctttaacacacagcgggcatttacatctttccttctgcttcagttaagcagtgtctactctatgggtcccctagaagctagtactggcctgttgtgacttaacatcacccagtagttccatacagacagcagctgaaacacactttccatcttagaaatcataatatgctccctgtttcctggaaatggacggtgttagatggttcatcattgctccatcttccaagaaaactacacatgcaaactctgctatgtcctgttgagaggcccctcattaggggcagataggagcttcgcctgaggttatattatggttaaactattgcgggtaaccaatccatgtctattgagaccatgaacaacagaaatgaatttataaaacaaataatgccttcccaaaccctgtatgtaaatgtcacacatcaatctccccattaatctccccccgggcttctgggatgttgaaaggagttctcagaggaaataatgtttttgccctttccttttatttggaaaatcaaaaccaagccgggttcgaatgaccagcctttgaaggaaggaaacagtgtttcaccactgtagcttggacctcgcatgcaaaaagtgtgcaagcctcttctccctggtcttctcttccatttccacgttgaggatgcctacaaacaaaacagagctccgtgctcaggggaggagcttctggaggcccagaccccatggacactcaggtggttgttttaaatggtaagaagtgataaagacgagatggacactggagagacacttaggggcatgggccagctttgtaagtggtgttatatcctggctgcagtaagggtaagagtcacagcagctataggttaagaagcaggcagtgatatagaaataagagccaaaggtggagggtgttttttcttttttcttttcttgttgttctatgtcttctattaatttggctgtgaaaggggaaaaatcaagatcagattggtatttgaagagaaagcttggggttgcaggaaggagtaagtgaaggaatataattcccggccggggtcgggggcttcagaaagagagagatggaaactgcaccaagaaaagagtgaatgggctcaccccactaggaagaggaggcatctcactcagagactagaggccggtaaagacagaaaagatcgaaaacctctgaggtttggggaggatgtaagcaaattcttgaagctcaaattaatgggtacaaatattgaccagttgtcatattcagtcaccatgctcaaacgccttccacttcacaaggaattcatctctggtgtttctgttatctctcacagtgagaaataaagaataaataagaagaaaataatttttttaaaacaaatatcacaaaggattaatattcttaatatatagtctctataaaatttagtatgaaaaaaggaatctaaaaggaaatgcatgaattataaaaaaagagaacttctagattcagctccaatacataaaaggcctggaaatcatctctcccatccttacaacaagaaaaagctagaacactgaaaatcaaccagtgttccaggacctgttggagactcaagggctcagggaaaacctccacctggaaacctggagagttcagcagtctggagtcctagttgggctcagctcacctcgagcagaagccactagaaccacagactggtgggaacacttaggtggtattttgaggaattgctgggaactgagtgtggagtagaacaaaaatgagaaactctagagggctgcagtcttagaggggtcctcattttcatgggccttaagtctaggagccccacaaggtggccatggtgaagatctgagaaagatccccttgtacatcttgcagaggacagggaagtgactttctaccaaaaatacaggatggcaaaggatttttttaaaagagtaactttacagtggagaaacctggcaaacactacttgggccaggtggtcaaggtcactgtcaacagtgataagtcatgtggatagcatgttccctcgatatggtgtgatgataatggcactttactgttgtgggcttcctcccaagaacccagaccctagcacaatcatgagaaaaacatcggacataccccaactgtgggacattctacagaattcctgatcagcactccttaaaactgtcaaggtcatcaaaaataaggaaaacctaagaaacctttacagtcaagagggcctaaagagacatgaagacaaaatgtcatgtggtatcctggataggatgggaacttggaacagaaaagggacgttaagtgaaaattaaggaaatctgaatcaagtatagacttgagttaatggtaatgaatcactgctggttcattagttgtagaaaatgtgccacactaatgtaagttgttaacaataggaaaaacagggtgtagagtacatgggaacttggtaccagcttcacaataattctataaatctagaactgttataaaattaaacgtttatttttaaagtaagaaaaacatgcagtatctgaataatcaaataaatataaattaaaagtaagaggtgtaactttttttcatcaacacattcatcaaaacttgaagttcaatagtaatcaatcctggcttaggtacaataaaacatactttcctggattgctgtcagttagtataatgatttagaaagcaagctttgcaatacagttcaaaaacacactaactcagtaactctatttgtaagcatctattttaataaaataatcagaaagcagataaatgattacgtataaaattttgcatatttgcctcattaaaaattgtaaaaataagtaaaactgaaaaactaggaaaaagacatcatagtaattggtatgggagatactgccccactgggaatcatataaaagccaggctgaacacagaaaacaactgtttcctgagtttgggcagcagacaccccctggtgtggtctctgaaagaagagctcacccgagtgggtaccacctccagattggctttccccaaggatgcccttcaaagtgtaacccatggagatagagccagggagagacagtctgcttgatcaccatgcagggctcaaaattgttcaatatttgaaaatctgtcaaggaaatattttcagttagcaagttaaagaagaaaattcataggatcatttttaaagatgtgggaaatgcatttgaaaaaaatcaaaacccatttataataataactttgagctgaacaagaatggaagagaaattctttagggatgggtatatgctgaagacgctatcaaataatgcactgaaaggtgaatggttgctgtattaccactaaaggaagaaggaaggaaaagaatgtctctccccatcaccaccattaaatactcaacatatattgaaatgttcgtcaaggcaataacaccagaaatgtttacaagagatatgatattggagcaaaagatctaacgctgacatcattagcagataataccattacctaggaagtccaagggatttgtctttaaaacatactataaccaataagacgttcagtaacatctccagtaacacctgtgtgaataaaattatgacttcaattaaaaaaggaaacccaaataaatagatgtgctgtgtttctaaaggaaagacttgatattgtgaagatatacattctcccataattaacctatacatttttgagccattccaataaaaatccaaacttactatctacaaaatatgagaagctaacccaaatttcacctgagtgtgtaaaccagccagggttacagcaaattctagagcaggggagtgagtcaacaatggggcaccagatcactagatatcaaaagataaaccacaagaatcaaaacagaacagaattagccaaggaaaagacaaatcagtgaaatagaatacacagcccagaaaaaaaatattttaattcaatgactaaggaataatgaaatagctggcataggcataattgggatccacctgtgtgtcagatcaaggatggctccagagtctagatatgcctgccatcaagaggtggggtctctgcctcctccctttgaatctgggctggattttagttgctttagagtatgttggaagtgatactgtgccagctccagtccaagtctttaaggcaacagcagattctgtttcctttctctggtagccctgtgctgtcctgtgggaagtctgattgtcctgagttggccatgctgtgaggaagcccaggcttgccattggtggggggccatggggagggagaaaggggaagttgaggggccagcccatgactccttcctcctccatcccagctgagtgccccaacattgtggaccaaaagcaagtcattgctgctgtgccctgtcccaattcttaatccacagaatcatgtgaagtaatggttgtaaattattggcttgagggtaaaccaaattaggggatagtttgtcatgcagtaatagctaaccagaacaacttaggggaaaaataagttagactctctttctacactataaataagttccaaagggatttaaatatataacttacaaagcaataaagtactagaataaaactaagaagactgatagtttaccttgctaggaggtgtagaaaaggcaatttcatacattgttagtggtagtgtgaattgctacaactttttggagagtgatacacaatatctattaaaattatcaattctgagaatctagctatggaaaccaagttcaagttcttatcaatatataagactctctgtaagaagatgcctatcacagcatagttataaaaaaaacaatgaaacagtttggatggtggaatcaattgcatcctatccacacaatggaatgttatggagctattaaaaacaaaaatgctagatctatgcttatgaacctggagggattttgtcttattcagtttgggctgctataacaaatataccccatagatgggtgttttaaacaacacacacttgtttctcacatttctagaagctggaaagtccaagatcaaggtgctggtagatgtggtgtctggtaagattagacagacaccttctcattgtatcctcgcacggccaagagaaaaatctctctcctcataagggtcctaatcctattcctgatggctcaaccttcatgatctaactacttccccaaagccccacctcctgagaccatcacactggaagtttgaatttcagcatatgaattttggggagatacaaacatttagtccaaaacagatctcaaaaattaatttaaaagtagtttcacactctggaagatgatttggcaagttgttaacaaataaacatgcaattatcatatgacccggaaacttcattcttggattttttttcctgagagaaataaaacttgtgttatcacaaaaacttgtacacaaaggttcataaaagctttattcaaaatagccctaaaatgaaagccaggctagatgtcctttaacaggagaatactaaacaaactgatgaatccatggaatgctactaaacaatgaaaaggaacgaaatattaatacacacagtaaataacctggatgagtcagcaaagaattgtgctgaatgaaaaaagccagtcccaaaagattatatactgtatgctccatctgcacgacattttgaaataatgaagctgtagaaatagagaacagattaatggttgttggggattagagattggaggaaggtggacgaatgtgtgtgtgaggaaggggacaagaagaaggtgaggagtaatgaaaaggcaacaagagggtccctatggtgatgaattgttctgtatcttgactgtgatggtggccacaggagcctacacatgtaatgaagtagtgcagaaatacacgtgtgcgtgcgcgtgcacacacacacacacacacacacacaagagtacaagtaaaaccagggataacatcaatggattgcatcactgtcactatcctagatgtaattttctactacagcttcacacaatgttatcctcggaggaaactaggtaaagatacacaagaactctatattatttttcacaacttggaagtgaatctatagttaaccaaataaaaatctaaattaaaaaccttttaaaaatattataacaaaatctataatacagtaaaaaagtagctttcagaggtatttaaatatcatcttcccattttggtaaaacaagacaaaatgaaacttcatatatttgaatatatatttgaatgagcacaaggtgtgatagacagagctcaaactattaacactggttacctatggaagccgggatggaggagaaaagaaatgacattatcaagttatcaagatgacattatcgacatattctatgttgacttttttttgctacattaggatgcatttttataataaaaataaatattggaaagagctaaatgaaaaaacaaaaccataaaagtgatagggaaaataatatattatttttacaagtttagggtggagattccctttccaaggaaggaagattcaacacccagaagccataaaggaaacaactaacagattcatctcataaaaaaataaaaactcccacagatcaaaacacatcataaagaaagtttaaaaacaagtaacgtggaattttctaacaaacgaaagattagtagccaaaaattgtccttacaaatcacaaagagaaaacaatgaaatagaaaaattggtgaagactttggccagaccactaggataaagcaataatgttgactgctaaaacagaaatctttcagccttggtttggcctgagactctgaaagtcaagaacaagacagcaggtgccaactagccccagcgtctacatgctggaccccgatgcaagacctgctcagaggatgatctaaccctccacctcttacccaaaggagaggcagagggagacagggcttcttgtgaagagttggcagtggcccccgaggttccttggagacacacatgggcacacacacgcatgcacactcagacacacacggaggaggaaggcaatctgcttctcagcccatgccagagggcagtcacactgtgagaggaactccaagatgggtcaccaggagaatgtgacatgcgtccctccaaagactgaaggtgagggtacgtggctatgtctgctctgcccaagctggcacaaggggaagcaaaggacagtgaagagaggggaaggacctagggcatctaggccccaaattacaggctgatggtggcactacgagtggccccagtgaaaggccttccctctgtcaagaaaaggacaatctgggtccacagtggattgggccttcatcagcccccaaagcatcattcaaagagagcatcagaaattgcacccagaagtctgaaaaaccccaagctgtatgacatcagccactttgtggccttttttcctaatcctttctccttcctgagtccagcttaagaaggataataagcagttcctgttgagttgggggaaaagaagggtgagaacagctgagtttctctaggcatctcctgctggaggctggggaagctttcactgggatgagagcccagagtcagatttacgctggtcctgactgtgctgtgcggtcctgacagtgctgtgcgatcctagactgaccgactagactgagccactgaaaatttagtgggagttgccccagattttattgaacagcagggaaggaaaaccaggagagcagattggaaagggcaatagtgagaactacagaagcggtcctccacttggcccccggtgaagtcccctggatcctgtccagaaaggtcctcctcaccagcaatcaaaaaaacacaaattaagacaaaaatatgtttctctcgattcagaggggcaaatatgcaacatgccaatgtggtctcaggatggtgaggaaattgctcatgcatcactgaagagcctgggagtgcaaaaactccctccagaaggcaaaatgcagatttgctgaaactaaacttacactttacaaaaatcccacttctaggaatatgttctaaaacatctcttgtatgtgcataaagttgaatatagattcattgcctcattagaaaagtgcaaatttagaacaatctacgtttccatcaataagggtggctaaacaatcatatgaagaaagctctacatcactgatcattacagaaatgcaaatcaaaaccacaatgagataccatctcacaccagtaagaatggctattaaaaacaaaaaagaaaacagatgctggctaggctgtggggaaaaaggaacgcttatacactgttggtgggagtataaattagttcaaccaatgttgaagataatgtgacaattcctcaaagacctaaacaaagaaataccattcaacccagcaatctcattacagggtgtatgcccagagcaatataaataattctgttataaaggcacatgcacatgtatgttcattgcagcactatccacaatagcaaaaacatggaatcaatccaaatggccatcaaatggtagactggataaagaaaatgtggtacgtatataccatggaatactctgaagccataaacaagaaggagatcatgtcctttgcagggacatagatggagctggaggtcattatcctaagcaaactaatgcaggaacagaaaaccaaatactgcatgttctcacttataagtgggaggtaaataatgagaacacatggacacatagaagggaacaacacacactgggcctgtcagagggtcggagggaagagggagaggatcaagaaaaataactaatggatactaggcttaccacaagggtaatgaaatgatctgtacaacaaacccccatgacacatgtttacctatgcaacaaacctgtacattctgcacttgtactcctgaacttaaaagctaaaaacacacacacacacaaacaaaacacgatgactgcatacacacacagaataagatgcagctggtaaaaagaatggctctatcttctgatataaaaaagtctccaagacacaggaagtggcaaaagcaaatcacagaattgtatccaatgtatgacactccttacattaaaaagcaaatataggccggccacagtgacttacgcctgtaatcccagcacttttgggagggcggatcatgaggtcaggagatcaagaccatcctggctaacacggtgaaaccccgtctctactaaaaaatacaaaaaattagcccggcgtggtggcgggcccctgtagtcccagctacttgggaggctgaggcaagagaatggcgtgaaccccggaggtggagcttgaagtgagcgaagatcatgccactgcactccagcctgggtgacagagcaagactccgtctcaaacaaaacaaaaaaaaaagcaaatatatatgtatgcgtgtgtgtatgtatttatatattcatacatatataaatatgtaaaaaataattagagaattctcatcaaaatgttgccagtggttacctctgggaaggtagtggttacctttgggagggtagtgggtacatgtgaggagaggttttttgtttttttgtgttttttggagacagggtctcagtctgtcacccaggctggagtgcagtggtgtgatctcagctcactgcaacctctgcctcctgggttcaagtgattctcgtgcctcagccgcctgagtagctgggattacaggcatgtgccaccatgcccagctcatttttttgtatttttagtagagacagggtttcaccatgttagccaggcaagtcttgaactcccaaccccaaatgatccacctgcctcagtctcccaaagtgctgggaccacaggtgtgagccaccacacccgcctcacgttttttattgagtaaacttcactgctatatgaatcttttgtaatgacaatgtatttatatatgtgtatggtcaatgttaataaaggttagagaagttaaaaatgaagaaagagtactgtggaggatggagtggatgaagggaaaagccaatcagagaagcaccctagggtgctgtagcagtagtccaggggacacctgtggaggctggaattagacatgggcacgggaggagaagggggagcaggtgagcatgggcttaagaggacaactggcacagtttgttgactgtggacatgcgggctgagaggaagaaaatagattaatgtgatgactaatgtagctgatgacaactgtcccacacttcgagcaggggcccagggcaaggagcagggtggggaaggaagcagaggtgagagttcatatcccaggggatacacttctggcccatcagacagtggagtgtgtgggcacacacctcaggcggcagatcttggagattccaatttgtatttctgaacatgtaagtggctttgagcatgatcaaggtgaacaagaatagaaatatggaaggcaccaacagatgatggacagatgaggaaggagatgataactacagcaaaaaggccaaccacaggagaggctgccatttgttgagcaagtgagatatgctgtgtgctgtccctttattttattcaatcattataataatgggaggtgggttttatcatgattcccattttataaatgagcaattggaagcttagaatcaccaaataattttcccaacatagcaaagaatccagctctggctgactccacactcacagcaactacaccacttcgcttctgccgaagcaatcctacttgcactcctccttttggattgctgagaagcatcactatctaattaccataaagccccctcctctccatgcctgctatctttgtcctggtttgagacctctttatccctcccatccctaccttcagtctatcctgcacaggactgacaaagtcatcttccagaatcacaagcatgactacatcagtattctacttaaaatccttcagtaagtattctctctaccagtcgagatgctcgagcaaggaacagagagatactattgtctgaaacaaccacaaagacaacaaaacacatgaaacaatgggtttcttttttatttgtttttgtttttcagcttatattttagattcaggggtaaggaaggattttacctgaagccttagcgggagcatggaccttgagaccttgagtttggacttccagccttcagaactgagagggaatgcattcctgttgtcttaagccacgcagtttatgattctttgtgacagcagccctaggaaactattacaataggtttatagatttcatcagacttggaaaatatttgaccattagttcttcagttctttttctttctcaccctctcttttgctcctctgaggactcaaatgacctgtaaattaggccactttaaattgtcccacagttcactgatgctctgggagtcttttaaagactttttttttttttttttgagatggagcgtcactcttgtcacccaggctggagtgccgtggtgcaatcgcggctcactgcaacctctgcctcccaggttcaagtgattctcctgcctcagcctcccaagtagctgggattacaagtgcctgccaccacacccagctaatttttgtatttttagtagagatggggatttcaccatgttggccaggctgatcttgaactcctgacctcaagtgatccaccccttcttggcctcccaaagtgttgggattgcaggcctggaccactgcacctggcccaaagactttttaaaattttctttctgtgatttctattgctacatcttcaagatcaccagtctcttgtgatgcctaatctgatattaactccatcgtgtgtattttaaatcttatatattgtcttttgtttggatcttttaaatatcttccatgtctgtacttaactttttgaacatgtggaatgcagttataataacagttttactgtccatgtttactaattgtaacatccatgtcagttttgcatcagtttcaattgattaactgtctctcattatgggttgcatttttttgcttctttttttattcactgctagacattatgaattttaccttgtttggtgctagctacttttgtaatcctatgcatattcttgagctttttatatgcagttgaattaactgaaaatcgtttgatcccttcaagtcttgctttcaaattttattaggcaggacaagagctgggtttagtgtaggactaatgatagccacactcatgaggcaagaccttttgagtactcaatgcccatgaattgggaagttctccagtctgtctggtggagacaggtgttgttcctggcagcactccattctctgcctttgtcatcacatgatgtttgtgtctcctcttcttgtgtacaagaacaccagtcatatcaaattagggttctccctaatgacctcattttaactggagaaaccttaactgattgctttctgcagccaaccagaggtaccttcaattttccatttgccacagagaaaaggggaaagatttgcaaagggagcagccttgagtccttttgttactgaggcatggaaagttggggttttcctctcaatttagttctaggaagtcagtgtgaattgatcttagattccctgcctccagaccctgttctcctgcctcaataggagagaaaagctacaacaataagtgaatccgcccaggagatccataattgaaaaagttttagaaaagagaacagagaaagtatatggagtgggggtcagtaattaaagaaaacaataaaataaaatgtatcagattttgcataatgatcatcagcctctagtgtgaaaagacccactgaataacccctaagtgaaatgagatccacgccaaccagagcactccccggataaaagagaaaatcccgaaatatttcagagagggatctggccttgtatgaaagaagaggggtgagaacggtgtctgacttctggtggcagctctgtgagccagaagttagtggccatggcttcaaattctaggtcaagaatctccgaccaagctgccaatcaaacatgaaggtagaataactaatttttgcacatacaagctctcaaaacatttcccagtacaaaacattcttcagaaagctatagagagggaaaaaaacaagagaggacccatctttcagcaactagagacccagcgcagggaaggcaaaggggactcccagaaccccaagacaaccgttggaccaccacgtgtgctggggcaggggcctgggaggatgtcgctaggagaggaagcccagccatgatgcatctgcaccactgcaaagagagcccccttctggcccagagtctagggatgagtgggaagacagcactaaaccaagggaaatcttggcaactgtttattccaagtaaaacaaaaagttgtacaaaataggaaatgtgcactgcatggtttagctgtgaataatacgaacatagtcataactatgtaaataccaaatattgatttggccaaaaattaggctgtaactaccatgatggggttgagacaaacagagagacagcacgtatgcacaggaggatggtgtttttaaagagcgacatcctcctcttccatggtggaagttcatcccgtgacatttaaactggaaaatcaagaaatggccttctaaacttgttattttaaagtcaggaggaaagcaccagaagaaacggcaggaattcaaagtgattgcctctggggaacgggaatctggagtgggaagaggaacgctgtttctcattacaaaccttgaagaaccatttaagttttaaaactacatacatatatgactctgataaacatacatttttaaaactacttacaaaacagcaaggaaaagattaagaagggtgaaggcagcacatttcagactgtttcagcgacttacctccaagtgagtaaatacataactcagtctatgccatttaggcatagacctaaaggggtggcatccagaaatttcttcaaagtcttacttattatctttaaaattcaggcagaagtttttactctctttcataatacatccctgtttgtttttatagtatgtggcatacctggcagaaggttttcttttcctctccttttgccttctttctctttcctgagacacacatcaggctgggatgacagagaaagacattctttcagtagaataaggtatagagggtgcccgtaggattaactgggaagggtgaaatatctgataatttttcagtcattacggactagtactaccaaggccccttatagcatctgctcaccccactgtctaagcctggtgtctctgagcagggaactcagggagcttgaagactggacccccagcacaaggccagggtgggaccctcttgggatcaggcggcagacaaagccctggaggaggggaaggagatggagtccaagaaggaaaagacatctcagtcttagcatcagaaagaccatggggttgctcccaaagagttagacctaaagccccacagcagagaaggaatctgggaaggtgggcttcaaggaagaaagtggagaatcccatcccaattctccaactcctcttgtgaattctggaatcagtacagttgttatactcacagcaaacatcgttcagggtcttcttgcacaacagagctttcaaaaatatgctgtgatttcatcagtttcctttattggccactgatatgcaaagtctatcctgaggctcaggatcccccaagttctcccaaagaccctcgggccccagtctaggaagcatggagatgacaagtggaaaacagtggcatcacacatgggacagatgatgtgatgttggcaggaaaattccctgggatacgacttttgtgggggtctctccacgtcctgccctgttggaggctggaagcctctgtgctctctacctcctgggggggcagcagggcagaaaacagaaggttctcagagagtacccctgttcctagctcttgttcttcaaacgtcaggaagtgtgttgggaagaagaaagaagttagctgcagaagccgggagggaaagaggaaagattgtgcagccatcgagggaggcaaagtccatggctcctggaggagagaccctgcctggctagctgtcggtgctgaggaaagcaacttctgaaagcaactgctagagggaggcatggaatttccactcctgtgcaggttgctgtgaccttggggtccagatgcacggtgcccctggccttgaggagaccaggtaggctgtgttctccacattatagccctaacgggtgggttggaggacttgcttgctgctcttgtgggaccttcataagcccaggattcaaaaggaaccttcaatataactgagactgaattatttccagccaggcagaagtgccagaaattcaaagagtatttgggaagcaaggcatatgcctgccgcttaagttattcttgttgttttgaattatgaactcctttgcttcaggtgatgccccatctggcctggcatccaaggcaggtgagaaatttcctccaccaggctttgcttggcctgggatgaggaattcgactggaatcacactcactccaccttcccacatccagacacaagcagtcacctttagggttttgcctctctctgttccagacagctggttccagagtcagctgtcacaactgaccctgacagctctagggagaattagcaaggcagaggaagggagtccttggacagagaggagggtggacaaggaagagaggagactttagagacaggcacatcccacaacctccggtgttaccatatccagcaggctgactgagccgcactgagccctgggcagaagtgggtgatctctgagctggggctgggtttcatttttcttgtctctctgagctcagccaccaggcgatacccaagttagtataccccacccacactgtggccgtgtcccagtgctccaaacgccacattgaagggagctggtctcagactgcagagctcacatgtgacagacataaccaatggggaagaaagagtcgtcccctcatgagtctgaagccagtacctaaaggagagaatggggaggcggcaaggcatggccccacagcagaggtcggaaggaagagctcccagggttaagaagcaaagccccgagacacagccaccattcccaccaccccagctcagggctacctttgggacccacccaaaactcagctaaggccagggaggaggggtcctcaaggacaagctgcaggcaccaagccctgccatcaggcactggccagactggagtgagaagccctgtgagcacatactcgctcctctacttgttggtcttggttttacgtgtcaaccgaggaaacagggccagtgtgtgcaatcgcctatggttggaggcgtggtggaaggcgagccccttctccccaggctttctgaaaccatgtgggagatctctaccagagtgacactgcctgcctcccatccccaccccccactgctggtggcgatgggacagtccagagtcctagtttgggtaggacagaaccatagaaaggcaaccccccactccggagtctcattccctcctctctgggtcactttgacagtcttgcctgctccagcattctctcggggctgtcggaaaagtgacagggagtgggcacagggttagggaggtgagtgtgggcctgctgctccatcggcagtgccgtgaggaagctgctgctccttctccagttctccatctcctgcatttcacttctcagctagatgtaagtggagaagaggaataatggggtgttatttatgagtcccttaaaacctcaacaaccctaccatgtgtcagacgaggtgcctggagctttgtcaatccctcgtgtcattttgtgccataactctccaggcgggaattatcaccctgtgcatgtgagcctcagtctctgccattcccacccctgcgctctttcctccacactgcaaagtccccatcggtagcagtacacttgtctctcagggcttgggtgagaagccctgggaacctcatttggtgggaagcttttgtcagctgcagagcatcaagcaagccttgggctctagattttgctgtgcctcgcattgctgataatccaatggtgtcttgcctccagctcccgaagtccacagatgtggcagcgatcatggccctgttccctgctctcctcagcccacacgttccccttagatgacttcatcggccacaaggctccaattaccggctctctgctcagatttatgtctcccgcccaggctgtgtgcagggatccaggtgcacacatccaatcctgtgcacacctccctcagccgtctgacagctgccgaagctcccaggtctacatccacttgacatctgcttctccagatctgctcctccagggtcctccagaacatggtactgtccttagacactggcccctctctcaacacccgtgtccaatcaggctttgagtcagggtaggtcaaactgagaactcctggccctgttcacatctctctctgcaaaggccaacatggtttctttgcccgggttatgtgctagcccctaaactagtcttccattcccaccttggccccatcaaatccattctgtgtactacccaatataatagttcttagacacaaatctgatcatgtcacacagtcgtttaaagcccttcaaatcctcccagtgcatttggagggaaactggatggctgacgggggcccaggcactacagggctggcttctgccccttcttcagaactccagccacagaagtctcctttttgttctcagaagcaccggctctttcccatcaaggctcccacacgtgtgtccctctgcacggcctctcattcccacactttgctcagccaactgcggccaccttcagtctcagatggcattagatggcacttctgcagggaagcccatcgccctccagattgacctgagaccccccgctctctggaatacaggaagactgaaaaaaccttactgtgttttgaactgtaatgtgttgtttacacttgtgtaatgactttcttccgtgagggattatggtgccttgaatacagaaatcagggcagcctgtttctcaactgtgtcctcagggccttgggcaggtctagcatgaagcagggattagtaaacatcaatggaatagattccatggaagaggctattaaaataagttgcaaaatactgaatatattggtttttttagtcaactataattttagagcacctgtaggttcacagcaaaaactacagagatttcccttataccctctgccccacacatgcaccgcctcccccattatcaacatctcccgccagagtggtgcatttgttacaattgatgagcctacagtgacacaccagtatcacccagagtccatgattaatttgagtttactcttggtgttgcacattttatgggggttaataatgtcatgtatccaccattgtgtcaagtgagggaagagggccagtgtgtgccatcacctatcattggaggcatggtggaggatgagccccttctcaggctttctgaggccacgtggggagacctccaccagagtgacactgcctgcctcccatccccaccccccactgatggtggtgacagcacggtccacagtcctagtttgggtggaacagggccatagaaaggcagcagctccccaccccgaagtctcattccctcctttctgggtgagtttgacagtcctgccatccccggcactctctcaatggtatccacatcgtagtatcacacagaatagcttcatggccctaaaaaacctctgtgctctgccgatgcatccctctgtccccccaacccctggcaaccactgatcttttaattgtctccatagttttgccttttccagaatgtcatatagttagaatcatacagtgtgtagccttttcagagtggcctttttcacttagcaatatgcatttaagtttcccccatgtctttccatgtcttgacagctcattgctttttagcactgaatcatattccatgtgcctggatgtgccacagtttatccattcacctactgaaggacaatttgatgcttccaagttttggcagttatgaagaaaactgcaataaacattagttttgggggtgctggttgtgtggacataagttttcaactctttggggaaaatgccaaggagtgtgactgctggatcctatggtaagagtatgcttagtttttaaagaaatgtcaaactgtcttccaaaggaaactgtaccacgtttcattcccaccaacaaatgagagcattgttgcttcacatcctcccaacattggtgtttcccgggctttggattgtgttcattgtactggtatatagttggatcctgttttaatttgcaactccataatgacatatgacattgagcatctattcaaacacttatttgccaacttgtatcttctttggtgaggtgtccgttcacgtcttttgcccattttttaaatcaggttgttcgttttcttattgagtttaagagttacttgtatattttaggtgatagtcctttgtaagatgtgtttttttcaaatttttctcccagtctgtggtttgttttctcactatttcgaattatattgacttgacttaaggacaaaaacaaccctattttaaagagtttgtaatgagaatgagtacagcaccttcttcctagatctagaagcagtgcacagctgtggtttcctaggctttcctggccattagatgtgggtttgtcaggagcccacactggcctgctaagctgtggccactagtcccacgtctcctgggctagctgtactcttttgaagccagtgcctagactaatgctttggggtagaaaggccgaaagtcctctcactagagactccacctgacaggcctctctctccagggaggaggtggtggtgcctcaaagaagaggaattcccactcttggtcattctagcaagggacaggaaatgagattagtgactgggtgaggcacagggacttatttggagcattctcagggaaggggaaggcaatcttactccctgacagtgagggaggtcatgggagaggcagccaggaagcccccttgttccggtccagggagctcacccctgacagaggcagctgagagttgatatgcctgggttgatgactcttgcacccatttaatttaaaggataaaggtaggctgcagtgctttggggccaggccacttggttttgtgctcctttcaggttttttccacggggactgttgtgcatctcacagcactccacgtgcctaagactgcaattgtgggtgcatgaggaagacagagcccctccaactcttcctgcccagccgttggtgagaacagagccagagctggagctgcaggagaccttggtgcagtgcccagtgcacactgccctacctgacaattctgttgggatctgggggacagccaggatccagaggggctggaggaacagaacaaggccctggacataggctggccacagagcaagcgcagccaaagaggaagtgctgtgcctggtttctttccgccctccctcctccttcttccctgttaactgttctgctgggagcctccggatcatggattagggattgtggtgggaccctgtcagactcaccatgttgaagcaggtcaccaaaggtcacacagttgcccaggatgagaatgcctgtgcccaggggtgcatcaggtagagtgaggagctgggattggatcccttggccaggctgctgcttctgcaattatccagctaccgtaggacaggaataaaagaagccacagaaatcaaagagctgaggtaagcaggaaggcagggcgagaagggagggcccaaaacagcctttccccaaaacagactttgctcatgatgatgggaactgtcgagtcttttgagggaccaaaagggggacacagtagcagagctgaagggccttgtcctccaggaatcaggaaggaaaggaaactaaggcagccagagtttatgggtcagtgctgggccccaaagcccaaccgtgcaaagggttttggctccacctccagcaaaatgatgtctgatgatgtgtcccaggatggggtctctgccagccctcctactcattgatgctcaccctgcacccagaaccactcaagaagcagcgggggtgggatgaacctccaggatgcctgcaggtggggcagattcaggggtgaaattcagaactgatataagaagtagatttaccttgaagctaatgatgcttccagcacaggcctctcatttgtaggaaccccttccaaagccccaggagtggctctagcaatcaatgtaagtaagaagataacctctcattctactgggacctcccctgtgtcccacacaatgcactctgcccccatcaggtggcactggagtggccccaggcatatgggggatccagagaggttcagctgagaatatgttatttaatctataatctggaaagatgctttgaaaagttgcaataaaacaaatgagaagttatggtcttccactttggacagaaatatgattttgtcatccttaaatttttaattaaggaacagagaaaaaaattagataatgattaatggggccaggcatggtggctctcacctttaatctaagcactttgggaggctgaggtgggaagatcacttgagctcagaatgttgaggctacagtgagctatgatcacaccactacactccagccagggtgacagagcaagaccctgtctcaaaaaaaaaaaaaaaaaaggaaaggaaaaaagaaagaaagaatttactgttaataaaattatgtttttaaatgttcatattttaccatgaagaagtagaaataaatgcctaataaaaataataatcaggctcttggaatatttagtaatctaatcaagagaagtgagtcctatgaagacattggggaaacttttaaatttattgatgaattaatcaaaactgacaaaaacaaagaagacactaaacatgaataccattaaaatgtgggtctagaagtgtatttgtcattcagagagcatttcaggtcaatcaccatacagaaaatttgacatgccctaaagtcatacagctcagatgggatagaaacatggttcaagtcttccctaattttttcaacaatttattataatttatatgacattatcaattcatcatgaagttgaaataaatttttctcaactaccgattttttcagaaaatgctgtttgaccagcactgccagaggaaagactgaaattacctttctattatgactctagaaaatcattgtcatatgaagagggaaacagcaagtacctagccaaaaatacaagaaggaaaatattacacagtatgtctggaagccagtaaataatatgtttttgcagagttttgtgatgtttacattatttatcagcttttaaaaaatgtgtagttcattttaattcttgtatcattttgaataagtattcacttttacacctagttttgtactcacaattttgttatcctttttctttacaaagtcccctacatttaatatggaatcgtagaaactagatggactgtgacagaggtggtgaccaggcatgggtgcagacacaaactctgcacggcctcagtcaccttagcccagaagccacctctaggccctgggacaaagagccaacctaaccacccgcaggcgtgcagccccactggcaggcactagctctccatcccccaacacctccccatggctcaggcgcccctgattcaaatggggaatggactggcatctggtcactagatatctcgtccccagattaacttttgagtcatttccaatcctgttcttttttaaagactgatggtgtgtactttcacactcctggaaagcaaataacatgagtttctggaggacaaactggcaatacatattcaaagtattcatactctttggcctggcaatcccccttacaggaatctatgaataggaatgatcagaaaaacagacaaatatgtaagcaaaataaggttcccacagcattgcatgacacaataccaacagtgttaacagaaagaaaatccttctgttatgtctctcccttgtcactaggtatccacagcctgaagaaatttaccaacatattaactaaaatgctctgagtggtacaattcggaggatggttgttttcttctttatgcattttgtgtgtgtgtgtaacacagatgagtttatcagaagaaaatgcacttttaaaatgaaacagtcgtagaaggaaatcaatcagacacctaaattaggaggctgacacaactgctcccaaaggaatgtcttagtacccctcagtatttctttaaaataaatggcttcagaaggctaaaaaatgggcctgcccacctcttttctcagggatccctagagcctttgctcagacactttgattcagtaatgctcataaatatggagcggccctttgcaagatcccttgcattttaatgtgggggtagtgctcacctcctccgtggatgggtgattgcaagcagtttcttggtcctcatttctgcaagagccagtgaggtgtgtggactgggatacttaagaaggagacacatggaaatgccatcttctgaccagggagtcccttggaccttggaagcaaccagagagcagagaaagaacagtagcccatgcagatgaacttacctccctcttctggccttgctgttgtcttctgtcaagtggggagatgactctgagtaatctctgagggctctccaattctgcacatgagcttcctacgagcagggaagttgactggcatggtggctcatgtgaaggccatggggaggacagggagttcacccgatccagcgcggatgcccttccttcatcttagcttgggcgggttagtatttctcatcctgaagtcaagctacctattctggtctcctggagtctcttctgacacaaggctaagttatgtaaatacacaaactaaacatgctttgcaggcataattttttaaacagagatgaggaatagagaaataaccaaaaaaattatgtacctttctgtgcctggtttatgtctgatttcacagaatccagcagactgtatacacatgggacaagcctgtgaacttggctatcacctctgagtttcagagggtgggtgacagacaaagacaggctggcgccacaacccagcacagcctgcagaggacacctacacatggggactcggtgtgggtcttggtggcacaggggagtctacattggccaggggagccctggggcccaatctcaggaagggatgtgccgcagggaaaatggagggccagaggagatcaaggtagagatttgtttctgtgtacggtgcagagagaggtccccaggtacaagccaagatgtcacaagtgcagggtgggtgaaaggcatctcagaggccacctgcagggaaggatccctactgacctgggcacctgaacacagtgtagcctgcaaacccgtcctccccagaggctctgcacccacacactctctgatctccctcatctggacttttataccaaagaggttttgatgcgcctatcagcttgccaaggccactgacagccacagaaatgcggtggagccaaccccatccaggggtcagtctttgatcctatttattatttagaccagtttgtgacttggtcaatacagatgctgcatagacaggaagcactgggtgcaggcttcgagctcattcccacagatttagtggtcagagaggaaagggcaacaccttggagaagcttgggaaattgaggcacaagagatgaagtccaggggattaactcgctcagcctcaactggcaaaatcaaatttggaagcagctagaaaaccacattgtgaataatgtagtctggcttggccccccacattgccttgtcgtgggcttccaaaccatccacttggaagtgccccatcaccagcctctaatgaaatgcaattggtgttcccgaccacgttcctaccttcaccagtcccagcagcccctcagtcccggccgcacacacttgggcacgccatgccagctgcaccaagccaatctgctgtgagatgccgggaaacggtttgcaaatattactttccaaatttatcacacttggcctggtaccgtggaaaaagttggttttgattttactgtggatgatcctgaggccccagtctgtgtcctactggggctggcttcgggtgctggggccgaagcctggtctcagagaggggccgggccttctcaagtggttctgctgccgagaaaggtgccagcccctccactgaccactggccacctgcagaagcccacctggctacactggccctttcctggcactttccaagccagcgaaggtgatctccctctggcaaacagaaatctgcgctgttgggagacagagcagtaggcatctatctccacatagctatcttgagcacctggtatgcaccattttgttagcatggaactctctccctatccctatctcagcagcttccttggagccagcagcaggcctgaggaggaggagaggggagtggccatccagctgtcaagagagaatccacaggccccataggagggacctggctgcccatcatagacactcagtctctcgctctgtggctgtcaagctcccaatatttctgtctctctcttcttttctgtctttatctgtatctttctctgtgtcttcttctctctctgtctctgtctccctctctgtttatccttctctatatctctgtctctgtctgtctctgtctctctctccctctttccctcctctccctctctttttctctctccttcctccccctttccttgcatttccctggggatgatggagttttcctccacgtcaccatgtggctagacaaatcagccctggcctttttgctcttgcatgagagtagaaggcctcccaaagcccctcaggttccatggtgtctgctccagccaggccccccaccaaaaccctctgaatcactggctctggggatggcaagagccctctttccctggtcctcacactcagtcccagactgttgagactaatgaccttgagtgtgtgtcacgtccctcatgtccccctctagggaaactggccagagtgggaaatcacagccagattttgggtcatgggcaaggggctgagggctcatgtctgtgaagagaggggcctcgaggggcccaggcagggaatggcagtgccgggagcactatggagagtggtggggtctgcaggaacctgccaccaactagattgggcagccgctctcctgccgcacgtctcctttcacatctgtggccagagtctccaacttttcaggagaaactgcagatctagattttcatatgaaaatgttaagacataattcaaagttttttgagaagcactctgcaagccaaataaaacacatcagcaggacggatctggccagcacagcacattcatgacctctgtttggtgtcccctaacacccacccctgggccccagccaccttcagggctggcaggggggcctctgcttccagggcccatgctcctccctcgccttcatcctggtcatggggctctgccttccccggagctgtcccagtgttcagatgaccctgaggcaggagcccacctgcagtacagcctccaggctggtcagccggtgtagacatctggtcattcttcatgtctgtcacctgcccagctggtcacaaagcagaggtccgagccccaggaaacccaggaccaccaggctgtggaggagaaagacttgctggtgtttcatggcccttgtttgctgttaccaaagctcatgtttaaacacaattactttctgctccactcaggcaacccagttggcacacccttccagggaccaagtcccatggcctttaaggaagccctagcatggggctgcccattccccagacatgaaaggcagctagtaagtttgctactcattagctgtgtggcctgggaaaatgacttagtttggctggcctcagtttcttcatctgtaaaatgggaacactatctcatgctagataaaaaaggacaaaattagacaattagataaattccctcccagcttcacccatgtgcagaaatccttgaagaaggagaaggcgaaggagaaggagaaggagaaggagaggagaaaggggaattaatatttgttgaacctattatgcatgaggcaccttgacaagggcttacaaatgtcatctcaactcaccctatgaatcaccctggcaggctatcaccccacttcacacagcccctatttccacttcacagatgaaatcctgagctccaggtaagttgagctatttgtccccggaagggcccaagatttgaaccaagattcaaatttggtcggtctcaacattaaacctagaaacccggccagctgcagtaacccccctgcagtgccttcagcctctggccctggaccgacactccctcccatggctccaacatgtgtgggcccaggctccagcgccctcctcaggggctgccctgcctctgctcttgagaggacctgcaggcctccatcacccagcccacgcttcctgtctgtgttgcaggggtgcccaacccagtgctggcctcttcctctcggtgttgcaggcggcctgccaatgccattccttgactcaaatggactctgtggacaaaagaacactcccccaactactgccttcttggcccaggcaactccttctcatccttcagaacccagttcagacatacctcgtattgggggctgtgcctggcaaccccagctccccaggctgggctgaatgcctccctaggccacaccagcacccaccttggccttgatctcattcactatcagtgagtccactctgcagtgaggggcaacgctgagctgaggtaaggcagctctcctggggccactgccttaacctgagggtcccagcagctgtccctggggcccctggtccttgcctctgatgccaccctgtgctgctgttacccactctcaagcaaaccacaccctggtgggaggccctggggctgcagaggctgtgaggacagagcctgaagcctctgctggggtcccaccctgagctctgaaagaacccccaaatggaagcccccaccctctgtgttgcactttgcttttcccatgtggccacaggtcccaggttggggactgggccaccttcccttcctcttgctttagtttcatgcccagctccgggtgtcttctcgtcggggactctgcatgcctttctcagggctgagcagagctgaggggtccaggagccctggttacccccaggtgacatcccgtggtattgttagcatggaggtgatgtagtgaagacgggttgtcagctaggatgggggcgagatgaccatctaagcaatgtcagagcagggcacgtactcaaaaatgtacaaacgtatcttccaatcttccagctgttgggagagcttgggccacccaagggcacagcgccccctgctggccatgacgatgatgcggcttagctcacagggctttcctctgcagcagctccccagaagccaggcaggggagtgctgggcggggtgggagagggataggggtgtgcatgcatgggccatttctcattctctaacatacaaacgtgctctgacacctctcttgaggaccccctgtgcccactggcaccaccaacaaatcaatcacatagccaatcaacaaattaacaagcacctgcagtgtgcacacactggcccagactcaccttacctggatgctccccacctccactctctgtgttcaatttgccatagtcctcctgccccacctcccatggctctcacccccacagaactgccccttgtgccttcctcctcaaccaggtcctcacgcccccaacaggacacatacccagggcccaaccacgtggcctatctctgcactctcctgcacccatccatcccgcacaccacccacactccagtactcttgccaagaatgctcgagcattctcaccaccagctccacaacctccagggcttccctgtccttgagaaagagcccagggaaaggcttgggtgatcagacccaacctgcagacgcagccctgcctgcctgactcccactcaatctgccctctaagcaaactgcagcagcacagcaccattcccagaaagcacccttcacagcagcctcccacacatcttcacagccccccacctgcacaggcatactcagcctcacagagtccccctacagccctgacccctcgttcctatggaagactcacgccgaggccctcgtccattcccattgcacatggacccaccaggccactcacctcttcatctgagcccccacacccagaagcacccatgccccaacaccctctgtggtatccaccctcccgcccacactcagggttctgtacagaaaggagggatgcagggagtgtggtgagcataggccccgacgcccagtttccccagagaagcctttcagagaaatcgctttcacatggcagctttggtcctccgggagggcagcggctgaggagggggcatgacggggcagccagcgagaccattgttcacgccttggctgctggagccaagcccctaccccagtgccccttatccattggaggaggccgcaggaaaacaaggtctggtacccgaggggcccagtgacccgtttgagcagctcccctcaagcagaagtttcccacatgaccttccagccgggccctgggctttcctgcctccacagcaaccgcagtcccctcgcttggcactgtgtcttggcccagggcacaggggaagggaggaaatggggaggtggggagaggatgcacaggcctagcccgggctcccagctggcaacagcccttcctgtaaggacttctgggccctctgggtcctctgaccacctctttccaccacccaaaactggtcatggcctgcatgggtttggggacccagtgagctacactcacatcactggatgcttcaaagcagctgtgtgactccaggcaagtgtcaggaccgtgggttcctcatgccctcctggctatcaagcttgaagggcccacgtggagattcgagggaaaatgcacactcaggcccaggagcagtgcctcacaccagtgagtggagttcccttttaacatattcttgggtattgcctccacctagggtctgtttgtccccaaatttaagcttcctgggttctgactatgttgggcccagtggtgtggtctctgcccagctggatgtcagcctcccctcggcctcaagggcccagtgctaccacccatgtttccttaccatgactctgagcagtgctggtccctctctgagtcccaggaatggtgcacttgtctgctaccggtatctccactccccaagaaccttcctcacccatcctactgggccacccaggacttctggccctctctggacttctgacaggctctgctataagcccaggctctccacctcctcacacccagcccctcacagggccaacgcaccttagtaggtgcttggccaagggtggcagggccatgttcaatacacagatttcctctatgagactttgcggggaggacagagagcttgccagcagcctggcctcttgtcccgtgccctaggccctttggagggagcccctgccctgaccctggggcctccctacctcttgcactattgcctggccttctatagccagcccctcacacctcccaagctgtggtcacgtggaggccctgccactcacgggccacacctgccatgtcctcggagccttaagatgcaggtgttgagagctcggtgttgcctgtaaaggtccccctggaggggtccctcccatcaggcctggaggctcgggtctgtatacatgcatctgcatggggcatgactggtttccagaacctcagagcccaatccacctgcccacatagcccataccagctgaccaatgacagtgaggcgaatcaccagtctcctcctcactctgaggcctccctgcgctgaccctgtcctcaacctttgatttctccttcttacagcccagctcccacattggactcagttctgtgatttgggatctggccttgacctccaacttgccccagattgtgccttggacttggcccagtccatgctcaggtgggccacccagagccactttgggcctctcagagcttatttcctttggtgtttggtgctgtggacagagaatagtctggcggagaggggagctgagacatgcaggatgctggtgcctggaatggctggcactgagcccatcgctgcctggaaccactggctgcctcctctctgtggcttgtctttgccatagtctgtgagcttggggcccacaccccatggagcaccatggccagacccaggcagcaaaggtgaggttggcccacagggaaacctgtggaaggctctggcccccaccccatcccaggctcaccctgcctcacagaaagcacaggagacccctggcactggggctggagcccaggacacctctcccaacttcctctggattatgaaatatatttcatgtgatatctcaattcttttcaaacaacatggagtgacatctgcagggcactttcctaatgctaaacaccttgggtcagcagtagaaatgcctccagtcattggggtggctcctaatcttcagatgtcaggcgccagggaacccaacttagggactaagatcctcacttgggaagggtcctgggggccatcagagggatggccatcactcacaggtgagcgagtgtgcacatctggattcatttccacgactcaggatcacatcaggcagcatcaggggccccaggagggatggaggtcacaggctcccaccctcgtcttagccctggaaacatgaaggcctccagtgccctcctccagtaaccccgtgagtgcctggcacaacagtgggcactcagtgaatgccggtaagtgcctgctgaccagagctcatatgggggagtgcacctctctggcaagctggatcccatcagtgtcggcccacatgtgcaccagcctcgtttcagctgggagaatcgcatcaggacaatgggaaagcttctccccgttcccctgccaggtgggcccaacgccagagccgcgatccagggcatcgctgctaagtttccaggctcccgtcaggcatcactcccacccagggggaccctgcactgtctcacttctttagagacagatcaaattggagagagttggctcgcatcaaagacaaggcctatgttgtttacacacatttttttgggaagagggaacaaattattttccttcttgtccatgggatgccaatgatgagttctggagaaccactcagagacacctgtcatgaattcccagggcagggtgagtggagatggagcaaacagcccacagcgcaggctcctgatttagaagggaaagtgcagcatggattctctaaagtccagcagcagcagcttgcaggagacactgcggcactcatggtgccctgaaagttgcacgggatggaggccacaggggacgatgcatgctgatgacatggcaggaagggcaggtcttgactcagcccaagggagcttctacccggggccgccgtcctgcacttctgagcatattcatcagggacaaggggagaggcaggctcatggccctagggtctgggtccccctgacacacccacacagtggtggagccttgaggacagcctggggcctgctgcaggtgtcccagggaagagggcatgggggatctgtgcctgcccacattggaatgcctcccccatgggaagcactgcaggctgggcaactatgggggaaatcaccaggagcctgcacagaggccccgcccaatgcactggagcatgaagcaaggagcgtctgcctgccctaagggcaccccatctggagagagtgactatggcactggccatcctgtcagccgggagcctcagggaacaaaggcagagagagcccccagaggagatggcagctcaggtgagcctcaagtgatcacctgcaaggaggggatttccacagaggggcgtgagtcgacggtgggatgcagcttcttttattcatttatttatttatttgtttggccaaaaagaagaaagaaaaagtcccactcatctttaccatccagatcacattgggcagaggttcaaggaacctgcgtgtggcaccctgggtggaagaacgctctggtcccgacagcagtctccctctgctgaggccttccctgactccccaacacccgctccccatttcccttcccttctctccctgctctgcagcctgatcatcacagacgtagtgtgggctccacccatttttggagaccgtcagcccttccatggcagcaccttgctttcaccgggctcccagtcttgagctctgccctgagtgcctcccatgcacagtgctcattcattttggttcattcagcaccttcccattttacaggtagagaaacataggcccagagaggctaagtgacttgtccaaagcaaccagctggcgcatggcagagcaaggactccatccaggcttcctgaatctgcatagttaacccctgggccatagaatctaaaatggtaacattatctaaggtctgggatttttgcagttgcaatgttcccagagccgaaaacagtgggtggcacataatgagatcttcataaatgtttgtgaaatgaatgtagacccagccctcctgacactgaatctgcaaccccccaacacacatgcattacagtgagagaaatttgtcatcttggatgcactgaaccacatggcatttcagctcagggtccccactgtctgtgtcggaagcctctggggcctgggaaagcagcacaccccataccctcgagtaagggtaaactaccaggaagcaatgtcgggtgcagagagcatggcctttggagcatctgctggagtcattttcctgaccctttgtccttctgcccacagttctctccccttctcagcacagcatggaggtcagaggccgccgtagaagcctcattgaagagaagacagtctgtactagaaactcaaggattagaactgaggttgaatcccactttcgcacttggaagctgtgtgatcttgagcaggtgttccaacctctctgagctccagatacctctggattgacaaggtcagggtttctccctgagaagtaattttctaacaccttgacatacacactctcctggcctgtgtcctggaccactgggccagtttcaacccctctgctggagacagcagcaaggtccctggacgatccctatgttcgaagtctgcttgccactgcctccaacagcctgtctgccattccccaggcctcagtgctattctgtggtgagcacagaagtgtccttgcccagtctcagtttttatttattttttattgtcagcctcagttcctaaaatcttaccacgttattagaggaaggtatatttttgacaactttatccacagttaccttaaatcaaggtgtcatatacacagtgccaagactgaagatgtttttcaacataaaaatccattttgatgatgcaaaggctgttgagaatcccttttgaaatttcatcagccagtactcagaagacttttggatttgactaacacagaggaatctcttcttggtaaaggacctcagatccagatgttgttccaatggaaaaaaaaaaaaaaaggaagaagaagaagaaaaagaactttttccaacattcctttataaggaagctggtgctggggatatgatgtccactttactgggacaaaccaaaatatcttgataagtagaaaattttttttagcaaataacctgctgttggaaattttttaaaaaataaacacagtcctataatctatgtcaagttcagtggtaaacatgaataaaaagaacttaaagaacttaaagagtcaagcgtcatctgggtaccagtaaactcaatgtaagtggtgattcagcaagtgagcttaggtttttaaaatgtactttcaatttttttgttaacaggaaatgagttaacttattaataaaatccaaataaaatgtaaaatgtagtaaggttggcacaaaataattcccatgcatgtgaagtctgcacctgtttatctggggggactataatcttgcagaaacttgaaacatcctgacatctttagtatcttgctctgcaaattgggaattacagcacctacctctcagagttgtttgttcacttcccctgccccacattccaggtgaacccccgacagtgggtgcttgcttccccaagccagaatttaggtccaggtgtgtgggtccttacggcacatcctaagtgacagcatgcaggttctgcctctgaagacagcccttccctccttccctttctccctccctttactccacacctccgcatgagcatctagtgggcacaggccaggggcaatgctctaggacttggtgatacaacagtgagcaaagtctctgtcctcacagcgcttaccatgtagaacaagaagaaagatgctcaaggaacacacagatgtctaaagtttaatgcaaataacataaaagccaagataactgagtcccaggctgttccacccttcccccttttaaaacaatcccctctgctttgcatgcaggcttctctccttctaccctagcccaggtgagggcattcagagagctccagggggcatcaaatggaaggggtggctcaaggtctcaccagcttgcagcctcagcggagagcagtcactgcccctgtccagagtccgagcaagctaagcaggcttgggtctgatcagcatccacccacaacgagggcatgagggagggcgagtgtgcagagggacaggccacacttcttccaatcccatgcgtggaggcaggcaggtgccctgctgtggctgtggggcaggactcaggggatggaccagctccaggaatgggtatggaacagattcacatggcccaggtcagattcatgtcacagcctggtgggcagcttgaccatgccagcaccagagcacaggccctgccatggaggctggaacctgtgggctgggctgccaggctttgggcttgcggagcaacacacctgccactcgggatggggttttgtctacggcgctgccttgtggacagtgagattggatgggggagcagcagagcagtcaggaatgatgaggacacggggtggtcctcaagcctggtccatctgctacggcaagcctagtttgggacttaaggtggctgcaccattgtagtggttattacgtgggttttcagaaccagtcttcggatcaaatcccactcctgctccttctcagctgggtgaccttcagcaaggcttcctcatctgtaacttggcaacagtgacaggtgccttgcaaagctgtcttaagaattgatgagatggtgaaatccaaacctcaagctaaagcaagtggggagaaaatggtcactgctgtgaacagacatatcagcagcagctgtggtgcatggcagagccgtcccccctgcagcatcattccacgaggcgtggctgggtaggccttgcggggccagcacattctcaccctgcccacctaccaaggcctgtttgtgttaatgtcacagctctgaagcattatcatcagaggccatgagatttcaaaggagcttcctttgcagagccacattgctctgtccataattagcacaagtttccatgagcatgacgatgaggccagaggggctgccctgcaggctggtttgttagtgtaagacattcctggggcatctgcgtagcctgggctatgcttttccagccctcgctccccctggcccctgccctcagcagcccccaggccctcattaagggattagcgatatgggccatgcaatcccttggccatctgcttgagaagtgctgggttctttgctctgtcccgcctgaaccttatcagtggtcctcgcgcaatgtttgtgttgcaaaaatcaaagcaggtcttgggcggaaattatagaccactggtgtcatgagctaattaaagactacggggtcatacacaagggagaggacacagatttctcccactgtctgtccttctgctaatgggacattgacaagcacagaccaggaagaaggctgagaaagccagcagcccgtgagagtatgataaaaggtgacagtgacaggtcttgcttcaccaagtacagattgggggatgctcctatcagggcccagcacccgtcacaaagggtgtggctgtggggcctggcggcaggctaggggcactcccccagcagccatccagagcctgagggaggggatctgtggggggacagtctcatgttaatggcaacacatttatgacccaggaggaagtttaggacagttctgaatgtctacatctccatcatcaaaacagattaaaattcaagaataatcttgaacaatggaaaatagacaggcagggaaaaaccaaaatgtaaccttgaatagcttctgctgttgttctctgtttaccaggaggctgtgagcttcttgaagggtttggctcccccacatgcgaggtcggggactggggtgatctaagtgagtgatgggagctcaaacccttgcacatgggatgagataacatccctaggtaccatttgaatgctctctccccctccacactcaccccagttcccagccccaggcagatggaccagactccactgctgaatctaaagtaaaggcggcaaatgtacgaccactagggtcaatatctggtgacttaggtcctgatgagagtgcttgccatgattcctgcacagagggtgatcctgtactagaggactggctccaaagcttccaccggccagggaaggggtcacaggagcacatcaccacccaagcaagtgtgatccctgccaggactagcagtgctgcagtagccttgcccactctcctgcggtcaggacccctcagtgatggcacacgtcatccagtttggaaagatcatccagcctcaagactgggcagcacctcccactcaatgcacccatgtggccagcccactctaggggtccgggacacgcttcggtctgggtgcgggggtattcgaggggggactgccatgtctgtcagggagtgtgggaagcagatgctgtaaggtgcaaaccagtaattttctggggacaccttctgagcccctcctccttccttcagccattctccatgcccccttttgctgagcataatcctcaatttctttattactcaatccagccttctctggcagaggagtatctactattttccaggggaggcttctcaaaccaaggcctgcaggcgaaatccagcctgctatctatttttatcaatgaagttttattggaatgcagccaggttgatctgtttatgcactgcctatggctgctttcaggctatgatggcagagttgagtggttgcatcagagaccctacggcctgaaagcctaaaatatttactctctgactctttatagagaaaatttactgtctcctattctaggaggtatagaaaaactattttagtttagcctcataatgtccctgggcaatagacgttgattttcatttgaaggaaagccaccaaggcttggcaaagttaaatagaacccagctgttagggaagggaggtgggcctcaaagccacatgtactaactctaaagactgtctttttggcatttgtcttgttgcatctttggcagaataagccgagggtgaaatgttgccttgatcctgttgctggagcagggctagagcttttacacctcccaaacctgcaggatgtctagtaacagcccccaacttttctccatggaagtcccggttaaaatccaaagacaaatgaccctctccatattatcctccaagatccaaaattactcattcaaacagctctttcctcttctccttaggtttgtgacataaaagtgtatccaccagtgagcctcttcctcctccctttgatccaggcattgtgtgtgcatttggagcctgagccaggtgggtaaggtgaccctggatgccgcacgaggtcctttttgggactggcaggtgcctcttcactgggcagtggagacgcaggatgagggagttgatttgtggctatagagaagctgtcagagacagaacctctggttactcagtgatggccctccgggagtcaggaacccaacagacctcatctttagtctgtaggatcccccagaaagcagacgcgctgggcattagagtgcctcttgttctctctattggctgtcaagcctctgaacgcccttagtgcttgaagaactggccccagcatggatgagtcctgcaggattcaggacctagctgctgctacagacacggagcagggcagtccagactcagccatctttctgctgctgcacccacctacttgttacctgaactctgccacccagcagtaagctctgccaggcctcacagtggggtggtggggtgtggcccacacctcgccaccacccacccccacctccaggttgacctcggtggtcaagcttgccttgataccttcctgttctccaagcctgtgctccaggattctctgtcaaccaccccatctgttcaataaattcattttctactaaagtcagcccacacctgtgcagaaacagggttggagcaatttaggtgccttgtccaaagtgataacagatgggaaaaggcagagctgggattcaagcgcatctcctctgaccctaacaagcacaggctgctctcgctagccacacccctctcaaggagcagcactgctctttctagaccctcagaaatgggccacctcccagatgccaggtgtgagtgtcctgacacctgcccctcactctcctccccagccagggcttctctgatgaattttcccaagtcagcctcttgaactacctgccttcctgggaaacaccttcaaatctgcagaggaccaagtgggctccagaaatgaaagtggagcatttcactgtgtgtggagcagtgagaaagggagagggtaggcttggagagtgcagttagcctgcattgggcatcctgacccgtcgggccccaggatgggagggcacaggagcctccagtcacaggaggtccttggggggacaatgcccaaggcctagttgaggaagggggcagagagccggctcccagcacacctgccaggccccacacctgggaccttggggtcccagagatttcttttcaatgcctaaagctttgctctccgagcctaaggacaagtgggcaggacagggcaggatggcatagacttgacctccttccccttgtcccaagttgcactctccagacatgggctggctgcacacatgggctggacactcagggggaaggtcagacttcccaatctgggaccctgattttgctgttcatggccaggtgtctgtcccttggctgtcagctgtgttcaccaggtgtgtgtcccctcagaaggtaagtggctcttccagtgggagtgttgggagaaggaaggagaagagcattctgcaggcatccgccctgctgcaactgcgtgtggctgagtgccccacactctgtgcccagggccacctgtctcccattatggctgaatgtgctaatagggagattccagaccttagttcccctggtagtaaaggtgaccctgcagctccatctcaggggtgtgcctccctgaggcagtctttcacccatgagagacttgcccaagatcaagacagcagaacactgaagctgagctgcccctccaacccagctctcgccgaccccaggaatcagggggctccccacttatttcctcctgtgttccagggctaaacattcggctttacacacacacttacctgcatttaacacctccagtcatcagccctgcttgaatcaagttgcctatgtgccagggaagtggtggaggtgaccgctcctgaccacagtcacctggccccactgggcaggagcatctcctggccgggagcagtgagggtgggaaagtcattttctcaagcattggatgggggctggaggggagcagacatgctctgtggtgggctttgggaacacagattccttgttctgggtgagcggtcatgaggcaatccccatttcctcatctataaaatggaaaaagaacctgagaatgctggcctcatgacctcattgtgcggcacacacagggaggatcagtcctgtggtgggtgctgccccaccagggcaggtgctccggcagtgacggggctcgtccacagctgtggcaaccccgatgcccccaccttatctggtagtcattgtcatctgcatcctccctgtcattaacctccccatgccccatgccctcccttttacatcctggccaggctgtctgtgccagctcaccagcagcccatgaaaagcctggacaatgattggagagaacagtaatgaatacaaatcattctctgggcaccacagagcctatcttgggtgatgcagcctctgggtgctaaccatccttggtccttcctggaatggctgtcaggccactgaggccgcaggcttgatgaagatggatgatggcctgtgcctgggtaatgctgtactaacacagagcccagcgtttaatcagagctctgctctctgccagagccgagtaattggaggcaggtgctaagcacaattgaaataaaatgtggagttaataaggacagtcgacaaggatgttacaagtcccctgtccaagttttcaacaggaattggaaggcaacttggagacctcagaaactgtgagttaatttccaacgtttctcttcaaaaacaagtacaatcaactttagggctttttttaaagcttatttattttcatatttgcaattcaaaaataagatggtcagaaaagcagcacatgtctaagatacttctgatgtactacaggggacaccagctccatggaggcctggacacccctcttcccaccttcatgctccgcactcagcaccagagtcctccaatctgcctctctggctgtcccttcctctcccagcccattcttaatggcctctgcatccctcatcttgtatcatccaggccattgctaccagcgcagtcttgctagaatgcacaactccctgcagaaagttctattccctcccaagtagagctaagccccaagtctccatggcctggcccgagctgggcccagccttatctcccactgctcctgttcccttttgctgctctagtcatggtgaaaatcctccacctgcctggagggtccctgccacctccactcttaatacactctctccctggcctgaaggatcttccgcccttcttcattgacattcccagatagtgccccaagagctgtcctgagccccgcgcctacttcctgtgcccacccatcccacggacagcactgtccatcacatcacaccctccacaggctgctgccagtgtcctgtctcccaacccgctagactctgcggtgcccaggtcagactgtgacacctgcaggactgcaccccgcatggcgcctgcaccccacgaggcatcagggatgcactggaccagcccaaggctgtccttgtatcatgtgctatcacttactagccagcacgttcccttaaagctgcatgggtgacattgacatggtctgtgcccaccctcttcatcctcaaaacagtcccagtttatgatttcatttcataaatgactgcccccccccaccaactaagaactggaaccgtaagaggcagatgaatgaaaggaaaacagattcaagcctgaaatcctccccacccagccagcaagctgtctcgagtgccctctcggctcagtcttcagtgaagtgacacctggtgaggatgggctgtggattgtccccctcaccagctaatacacctggattacacagtcacctggagaatgagcctcagggtgacccacctccatgtcaaggggaatcttgaggtccatgagacccagctcctatgtgaggggacccacctccgtgtcaaggggactcttgaggtccatgagacccagctcctatgtgaggggaccattccgcattatccccaaagttggagtgcatggagctaccatatgatccagcaaccctactgctgggtctatactcaaaagaaggaaaatcagtttatcaaagtgatatctgcacccccatgtttattgctgcagtattcacaacagccaacatgtggtcactgagcttgactgatgctcagtgtccatcaataactgaatggataaagaaatgagtgaacaatggaatattattcatccgtaaaaaagaatggaattctgtcattcatggccacatggatgagcctggaggacatcatgataagtgcaataagccaagcacagaaggacaaatatcgcatgtcctcactcatatgtggaagcttaaaaagtgggtctcatgaagatagagagtgggttggtggtcaccagggaccaggaaggttagggagagcaaaggataaagaggggttgattgatgggtacaaatatacagttagataaaagaaacaagacctcatgttcagtagatcaatagggtgacaatagttaaaaaaaaatctattgtacacttcaaagtaactagaagagaataattagaatgtttctagcataaagaaaagacaaatgtttaaggtgatgagaatcccaattaccttgatttaatctacacattatatgaatatttcaaattatcacacatacccctaaaatatgttcaactattatgtctcaataaaaaaaagttggagtccaacttcccccaagacaccccaggaaggggttttgtgatgagcaacagctcagagatcagaaagccccctctaagtcttgctgacatcctcctgtctctgtcggggagctacagagccactctggaagcaaatgctcccttccccacccctcaaatggagcagtcccttctggacatggttccaggcccatctttttcctgctcagccacagcacctcttcagaggacctcggtggggtctgcgcagcaccgaggaggcttcactccattcgggcagttctgcctctatggaagacagtggctcagagagtcagagaatgccctctggaatcttctgtggctctgactcacacccagccaaggccttccctctccccacccaagtctgaccatgtgaggagctttgcacacaatgtccctgattctcttgcatccttgtcctcaagccagagtggactcagcgaagtgcaatgatctgagggctgtgcttactcgaggcccacctgggcctgctgtctgctcctccctgctgctcccaggggagtccccccacttccccaacatccccagccccatctcccctggctccaggctccattgcaatctgaaagctctacaggcagctcaaactcaggtcccaaatggaactcattatggatccctccaaactcactcctcctccatcccctgctccaaagaatgacatcaccaccagccggtccccacgccagaaacctgggaatcatttgaggtgtctctggccctcatctccacccctagcaatcagtcagcattgcggctgcactggcctgaggtttcctgagcccagcccactcccttgcccactgtcattccctggctcaggctctcatcttttgccaaggctgttaccgcaccagcgccctcactgtctttctgattctaagctggctccctgccagtccttccctagcacaggtctcaagatgatctttataaaggtccaacatggtgtgtcattccagctctaaatccctcaagggctccccctacatttcaagaactcaaatgtcttgacacagcaagggagaaccacgtgacctggctcaggcctgctccccgacctgggagcctttctcttctgcacattcaacactgcttttttctcactttgacccttgtatttggactcccttgtcctccatcctcatccctgggcagtggctctcaaacctaagtgtgcatcgaaatcactgtaggggcttgttcaggcacatacaacactgggatcccctcagggtttctgataggtgagtttggggtggagcctgagaatctgcatttccaatgtcaagttcatatgatggtgatgctgctaacctgatggccacactttgagagacagcaccaccactaaaaccttcaataagcgctcgaaaggacccaaaaatgctagccgaatgaatgaatgaatgaatgaatgagtgggatacactctggccagccaaagttttgcagccactcgttaggactctgttgactggatctcacgtatgtgagtaatcttgggtggaatttctgaataagttaaaaaagacaaagctacatgttgcttttatcagggttgggggacccctgtgagtttctcttcgaggtcaggtcctgctgtgcgccctaagggtcagcatctttcccagacacggaggtgggaattggagggcctgggcctgggacctctgaatgcattcccgttacatcatttggatttctttatagactggagagtttacaacatcatcaaaacacatgtttttgtgattttccaacagccttgattcctgctaccatgtcctgttcccaggccaccactgagcacagcagacagatgccagcaagcatctgagctctcaaatgcacacagcatgtcccttctcgtgggcggggagctttggaaaatggaacactgggtgtgaaagacccagaaagggccctgtgaggctgcagagaaggggtgagggtgaggccagcctgcccagccagaccgtaactgtggagactccgtgagtttccagagtcgtgattagcatgaagaagcccctggggcccagcacagccatgatgaccagcacagtccgctgcatcagccaccgagggcctgggccctgtggaactcgccggggtagtgctcatgatcctgcttctcagtgtatctggactaggaaaccccatggtggtcaggacatccaggggagctgacggtctgtggccacatcactctccccttcaggcccaccaggctgaaagggcaaattccaaccctccttcagaaagggagttctccccgagtccttgagatccactgctctcttggggctaaactgtgttaacgaaaaattcagatgttgaagtctcaacccccagtacctctgaatgtgactgtatttgaagatagagtctttaaagacatgactgagttaaaatgaaatcattaggatgggccctaatccagtatgactggtgtctgtgtaagaagaggagacaaggacacagacactcagagggaggaccatgtgaggacatggcagaaggcggcgtctgcaaggcagggagagaggcctcaggagaacccagccctgccgacaccctgatcttggacttctagccctgtgggaactatatgggaaaccgtgggaaaacgactttctgtagttaagccccctagtctgtgattctttgtttctgaagctcaagccgactaagacagactctccagagccctggccaatgcgggcctctctgctgggtgaggaactaagcttagcgtgcctcatgaaggggttcaggggtgtccctgaggcctgtgcccattgcctgctctgtcttccccctggagagggcccttcagctctgtctgccctgggcatctcaatcccaccctggcttcccatccccacagggtgaactgcttgaaatgcagatgtgctcactgagaaagaggggcttgagccaggtttccaggcaatcctcacttgactgagccccagacggcagcactttgggccccatcccccaggcacggcctattcccctggggctgcacagaggctgtggggctgttacctggagctgaccttcggtgccatacagcccttttctctctggcctgagcattagccctctccccaaggcggtcctgcctcctacccccagaggggtgtgcttccctttaatttcctgcttcttccgtgaggatctggaagccaccttgcctctgggtgggacctgaactacacacctatagctggagatgctgccatggagcggagaaggaaggaggtgagctaagagaaggggtgggtgacaattctcttgacaccaaccggggacccacaattcaattcatttctaacacaactgcctggagctagcacagaccccacaagctagggactctgccctgcaagactgcacccacttcaagatgccagccacaaatctcaggggccccaggccacctgcacttctgcctggcagagtacacatttgggggctcccacagaccgcccccttgataatttgctagaacaactcacaaaactcagaaaagagctgtccctactattacagtttatgataaaggctacagatagatggccacatgaagaggtccttggggccagatctggggcagggcccatgccctccgggctccccttccagcacacccatgtgtttcagcatcagaaagctccctgagccgcccgttccaggggctttgttggggtttcattacacagacataatggatgcaatcgctggccatgtgacggaacgcaatcttcagcccctgtgcctccctggaggtcagaggtgggcagggccgaaagcatccgtcctgtaatcaagtgcttgggttctctgatgcccttccctgccttatcccactcaggtgtggagaactctggtgagggccctcctctgggatacagaccactggcttctctcagcattttcatgtggcagaaagtgggtaagaaatattctgggggtcccttttataaggcactaaacccattccagcgggctccaccttcatgacctaaatcacctcccaaaggccccaatcctaatcccattaccctggggattaagatttcggcatacgaatttggggggacataaacattccatccattttctctcccctctctcctgagtgaccccatagggttactgggtgagggtaccactctcggtctgcaggccccactcctcctcccactgccgaaggtgtctagacccaaaggaggagaccctgccccgagtcatgctgctcccatactgccaccaggctgctgggatgctgggtggggggctgcagaggcaggtgggggccccgagagtggtgttagggcaccctgcccgatcttctaagtgacaggagagtggggcaggggtggcgcccatgaagaaaggctgttttgctgtccacgtggagagtcatacaggggatcacagtgtacagccttgggaaagctctcactaaatagtccttgaatggaactgggggggcctgaagcaggtgggttaaggggagcctccatgtgtctgagacctaagagcaggactaacttggtgaccagccggctgggtaggcagagcaagggcttcaggcttctgtctgggctgtgagagaccttgtggatgcagggtaggggggcaggaaagagtgtggagtggcagcttcattgcagacgtgctgaagatgaggacacgggagcctgggcaggggtagccatcagacatgaggacacctatgtctgaaactcagaagtcagggcaagaggcacagatttggggctagccatgccatggctgctggggagggcatgctggggctgtgatggagaagtctcctgtacagccctgtccctgacctcccacccctggctctctccctctccccagggcacagcttcccaggaaagaaaagccaatcccatgaaacattggtggtgcaagcctggcagcatctgtaacgctctcactgtgctgttccttgttgggactaagacagccgcaccagcaggcttctccaaggactgggcgaggctgccctgtgaagcacatggcccacaggtccgtgcacccctctgccacgccctggctggggtgggcactggttatcccttccccattggcctcaggatccgggttgcctggcttgtggagacttgtgccatgctcttctgattagccaactgtggaggcttccagaagtgcagggcgacaagcctgtcccactgggccccatcaaaccccccaagtgcttcccttcccactccaatacctctgcatctgaagctccatctgaggctgggaggctcctggcttcttcctagggctctggcatgcctcaccttggcagaacaccctcaaaatgtgaacacaagtgtgttggggtactgacgcagtcgatggggagaacctggcaggtgtggcatcaggctggcagcttctgaccagccccatgacccctgggtggccaccattcccttctctgcaaagaaagaggccatgagtgaccccctcctctggtggggtgaagcttcgaggagatgggacccttgtctgcctggcgcccagcttccactggcaccagtgggcattcagtgcaggaatcccctctgccctccccctccccacccctcctatccaagttgacatcctcactccggtccctgtggggtactcagaaggaaggcccaaggctgggcagagggctcactggatagcccaggagcccaactccccactttctccacccaccaacaccttgtgggcgagcgccccccagagcccaagggcccagggcagcagcccgtcctggaaactgctgtgaggcctggttgtgcactcaggggcagtggccgggctcctggcttccggcagagtcccgctgggaactccaagaagggaatggtgagtgggaggccctgaccttcttcatgtgtgtggatggaggcagctggaccccatgaggagctcaggtcacaggggctgggccctgggagtgaggggtcagggaggccagagccagtatgtgctggttgcaggtccaatcctgtcaaatcctcaccttcttcacgggaggggaggcggtcactctcatgaaccctattttacagaagatgaaacaggctcgaggagggttagtaccctaggctcacacagctgggggcagagctgggattaaaccaggttggatggggccagggaccctgagtgaatgcaccacccacgctgccctgcagaaccatgtggagatgggcacagtgaccggaggtggccttgggggtcgatgacatttgcaggcaatagtgtagctctggctctctgtagtatttcctgcagggaggcagagggcagatggggtctctgcctcatgatcctgcagggaatctgccgtcagcgctggagcacctgtgggcacttgatcctatccagctgtagcagttgtcatccccaggaggggccagagtggcagacagacctccgtgcccctcttcaggaagctaagggtgactggagctcacaggcctccacccagcctggactcctctctcccaggcttctgggagtcatcccagaggaggtggggcccagagtccatcctgtccaaagaccacagacttggattcctgcaagggccaggaaggatgagtaaagagctgaggatggggcctggtggaggctctggccacccaacaagcaccagcctctaagaaaggcacagccactgactgtgcatctgtgggctaccaggctacagcctcatgtggacagggtcggatgagcccctgttcacacaggtctgggctagcaaagtcctacagccaccctgccgcaccacacaggggagggagcaaaggcccccgactgcagaagccccaccccatctggcttcagtcttctctctgtctctggtcctgaggccctcacacgttccctgctctgttcccaacacaccctcctccaccagactgcctctgagagcagggcacaggcagcaggctatgcaagtgagaggctgtggagttaggcctggctcgctccacctccctgctgtgtgaccctgggcaggtgcttcacctctctgagcttcagtgttgtcacttgacaggtggttgtgaagatccaaagcaataatgtgtgtcaagtgctttgcatgcagcagatgaagccttcctttcctccctgaaattaacaagtgcagtgctgggaagtgggagtcaggcataatattaagtccatgctcaaataggttgtgggtctgatggcagaggtttccagctggggctcatctgttagccatgaacttctgacccagaacagaggaggagacacaggttcagcagctgagcgtgtgagttggggagtcaggggatcctgcttcccagtacctgcctctggcagggtcctgattgctgcgcaggtgggcaacgccacctagtgggcatgcatagtgccatgactcagggtattgattgtcctcacacacgcgcacatacacatgcacagagctgtgaacacacacctcaggcccctacccacaccttcacccgcacacaaacgtcttctagcttcttaccccttggatcctatcttggagctgagcatcagcagccataaaaccatgcatccttcctctttccaaaagccaatttggggattgtgtgaggacagccaggtagtctgaaatggaaagggggtgaggtcacatttgctaagggcatgatagtgcatgccaggctccaagccatgagggaggtgtcaccgtagcactgaaaggttaagagcttgcccaagcccacccagagaacacaagactgcaagccccaggctgtgcagctgtacggcctggttcctacaagctccacagactattccatcataaaaaagggtttttctggatcctttaacttccttcttgaactagattttatttgaaatggaatcaacttgactcataattctatttagggtcccgagatgattttctaagtgacagcagaacctgcattctcagcagccattgtctaacctatgctgtcctcctcctccttctcctcccagcaacggtgtgtgtgtgtgactgtgtggtttgtgtgtgcacaaatgtgtgtgtgtggttgtgtgtgtatatgtggtgtgtgtggtgatgtatggtgtgattgtgtgtggtgatgtatggtgtgatgtgtgtgtgtggtgtgtagtgtgtgtggtgtgtgtgatgtgtgtggtatagtgtgtggtatagtgtgtgtggtgtgtgtgtgtggagtgtggagtacttgtggaatgaatgtgtggtgtgtgtttgtggtatatgtgcggtgtgtgtggtgtggtgtgcatgtgtggtgtgtgtaatatgtggtgtttgtggtgtggagtgtgtgtggtgtgtggagtgtgtggagtgtgaagtgtgcatggtgtgtatggcatgatgtgtatgtgtgcatggtgtgtatggcatggtgtgtacatgtacatggtatgtgtgatgtgtggtgagatgtgtgtgttatatgtggtgtgccgtgcatgtgtggtgtgtgtaatgtgtggtgtgtggtgtgtaatgtgtggtgtgtgtggtatgagtgtgtttgtggtgagtggggttcgcggcaccaacaggcgctcagagtgtggttaaacccctgctctgcaccagatgtcctgggtgtgttcctgtggaacccgtgcctggactgcaggctgctcctggtgccttgtttctaatgaacagaacaaggcagaagtcatcggccaccacttccaagattagattacaaaaaaaaaaacctcgggttctgccctgggtgcctcctgcctgctcccttgcctgtttcagggaaagccggtggccaggctgtggcctggagaggaccacgcagcagagaactgagcctggcctcagccaacagtcagcaagtgatctgccagcaactgcctgagtgtgcttggaagcagagcctccgagtgaagagagcgtgtgggacgccctgaggcagaagacccagcgaagccaccccaatccctgccccataggaaccgtgcgaggataactgttgttggaagccaccaaagggagggcagtttgtcacaccgccacagagaactaactcaatggaccttttctgtccccttctgagccccacactccctgctataaagtagggattgggtcacaggtcatgcttgcttaacacggtacttgggaccaaagagagactcaacaaaagttccctttttcctgtccacactcagaggcaggcttggatcctgctcacccagcctcatgtgatgaaaaactccaagtcaggctccgtcccacagctggggtctgacaaacagcacccccttgccagccacggcagctggagaaggaggtcgccggcagctggagaaggaggtcgccagcagcagggctggagagcagatctgatggcatcagctcgggcttgctccgtccatgccgggctggagtgtggccatcactcccagccacagaagctcgttgatctctgacctccctggtgggaacaggcccttctccaggacaggccagggcacctgcactcagacagtctgcgggtgctccctaggccagggctgacagccccgatggaaagctgatgccctgcctttggcacagtgagtccaggaagaggcacctagccaccacccacatctatgggagacacacctagccagctcctgattccctagcctcactccaggcacctcctaacactccttccatcttcctaaggggcaagaggcagcctcccaccccaacaacgctggctgctgcccaggctagcccagtgagctccatctgcagtcccatggcgtggatcccaggaccctgactcctgggagtgggccctgggaggagtttcagagctgctgtctcccaggggaggctggccaagcccctcttctcctgctctccctcccgtcaggcacagcagccccctgctctgggaaagtacaaagacctcacctctgagacccctccaccttcgaagctctaaaaccaggattctcgcatgagccaccctaacagcaaccctgataagatgttcttcctactttctagatgacgaaagtcagactctaaggctcaagagtttttggcaaggtcacacagcaagggtggcagtcttaaacgtggccccagaatcccttgactttccttccactgaggggtggggtttatgccctgtctttgagcctaggctctgtggctgcttggccaaagaaacactgtggacatgatgctgggccagtttctgggctcaggctgtaagaaacctgggttctcttggaacccaatcatccttctccgagggtgcccaagtggcccaaggagaagaacctggcttggccccctgctgacagccatgcggtgtgccatcttgaaagcggaccctccaccccaccttgagttgcccaggtgatgccacggggaaccatccccatgaagcccgacccacactacaatgtcatgagctaaataaatgtgtttttctaaaccgctaggtttcagggtaattttaagtaactgatacagcaagaagtgatgaacacagttcagatgatctccaagtccacggtctttttgattcccaaccatggctgcctccctgattctcactgtattagtctgaagagcttattaggggaggaacagaggccttgaaaagacccccaaactgaaatccccttccccccagggacagccccctccaggaaattcctttcagggctgtcctcgctgcatttcatctctagccctgcggcaggggtagaattctcagatgacccctaatgacttttgtcttttttataattttcctcgagtgagtaaatgtgagtatgaaaatctatcactctcaagattatgttacttatttcgtgcaaagactttgcaaatgttatgaaggttactagtcagtcagttggccttaaggagatattttctgcttgggtctaacctaatcacaggagacctttaagagtagaacattttttttctggtggtgggagatgaggtagtcagagagatttgatgcttaaaggggcttgtacactagggaggttctcctctcctgagacggaggggccatggggccaggccctgagaggagcctctaggagctggggtggtccttagatatcagccagcaagaaagtgaggacctcagtccaacaaccacaaggacatgaattctgcccacaatctgaatgagcttggaaacaatttttcccccaaattgtccagaaaagaatgcagtcctaccaacaactcaatttcacttgtgggattctgggtggacaacccagttgagcccaccgggacctctgacttacagaaccatgagataaatgagttaagttgctaactttgtaatttgttacataggaataacaaaattaatacgatcccgttctttttgtttccagactcttccttctccaaaagtgtccttcctttttttcattgcagaccttgtaaatggggtgacatgtagatctttaagccgtggctggagcgtgggtctacagccttggccaaggcccctgggccagcccttgggagtagtgtttccacccatagctgagggctgagtgtgggcccacagtggaatgcctgagcgtgcactagctgggcctccatggcctggcagagccttcctgggctggaccggctgagtttctgagtccaggggatgccgccaatgatcaggctcccagacttcctgttagggtgactaagcccagccttaattaggtggactctgatgatctgttctctctcaatttcctcatttctaggacaataatggttctctgttcataccagaatttcctcctaaagaaccagccccagactcttcacaccatttattcagtcttctccctgtgtaaccccagcctttcccatctctttccttttctgaaacccagccacactcttacagcgcacgcttacactgctgtacaggtggggctgagtgtgcctgacgccccttcacctcctctcctcaccccagttcttggccacactctagaacgcagataacacaggagttcccatgtccatctttgaaatgagaagcctgaggcccagagccctcagcacggaatggaaggctttgaatgcaaacctagagggttcctagttactttatgtctctgcagttactttccaggtttttaaggacagtgatctttgtcttctatcaccactgaagttatccccttcagaaagaagcactggcctagatatgcaacagattgttaaaaaaaaaaactgtctgataattgcaaggttgtgtatttacttatcatatcaagaagaaacgtgtggttttgactctccatttccttactaatcatcttatctgtgctacagcaccaccacattatctgtgtccactccacggtggtatgttcaccacatcactggaaaataatgccactcactgacagcacacccccaccaagctccatcttctcagaggatgagggcccagactctcaacaccctcttctctctgccccctgccattgtctccagaatgggagacgacgccaacctccatgctctgactctgctgaaaccctgctcccaggccctctctggtggcctctgactccactcttctcagccacacacagaaacatactcatcttgggtttcttcatccctcaagaatcaaaccagctcccaggccaagccctctgacattgccgtcattggccacaatctgcctccccttccacctctccccaggcctggttcacctgctttttatttccataaagaacaccccattcttttatcctgcaagtccctcctgaaaccattttcagctctatcctcacacacagaccaaacccctgcagagtccccctttctatggctgccttgtcaggaaccaaccatggataaggcaccacctgccttcctctatctcctggccagtgcgacatggaggggaagctgtgcaactgtgtgccttggctccttgacaagccaggcaacctccatgagccccccaggctgatgcacagcccagctcttcatcccttgctagcatccaacagctgttcccaatctccttctttttccccagtccacaaacccacccccacgtcccaaactcgtaccagatgaattcactttataatttattgagaatttcatcctataatgacattctcaccttctctccccttctcctgagaatgtctcttatcttaccccagtgtgtctttttctgtgaaatacccttcctctttttgaaacaaacatttccctctggactctaaatctctcagcttcctgattccttcctgacctccttccatttttctgtcttctaacttcttaaatttttattttttagctgtattgagatagaattgatatacagaaaattgcacacatttcatgtatacctcttcatgagtttggacatatgcacacaccatcaccacaactaaggaactaaacatattcatcacctccaaaaatttgtgtacttttttgtaagtcactttttttgtaagaacacttaacatgaactctgtcctcttaatgtattttaaaatgcacaatgctgtattgttaaccataggtactatgctgtacagcagatctccagaacttactcatcttgcataacagaaactttataccttgaaaaacaattccccatttcttccccaccgccagcccctagcagctgccattctactgtttctatgagtttgactatcttagatgccttatgtaagtgacatcatgcagtatttgtccttctgtgactggcttattttacttagtatgtcttctaggcttatcctttcttttgcaaatggcagggttttcttctttttaaaggctgaacaatattccattgtgtatatgcatggcagtttcttcatgcatccattgatggacacaggttgatttcatatcttggctattgtgaatagtgctgcaataaatgtgggagtgcagatatctctttgatataccaatttcttttcttttgggtagatacccaactgtggcatgtctgggtcatacagtactatttttagttttttgaggaactgccatgatgttttccataatgactgtagtaacttacattcccaccaacagtgtaagaatgttcccctttcttcacatctatgcaagcatgctattttttgtcttcttgataacagctattttaactgtggctagatgatattgcattattttgatttgcatttctctgatgattagtgacgtttagcatttttttcatatatctgttggccatttgtatgtcttcttttgagaaatgtctattcagatatttttctcattggattattattattattatcattattattattagccattgagtggtttgagttccttacctattctggttattaatctcttatcagatggatattttgcaaatattttctctcattctgtaggttggttgtctctttgctttgttaattgtttcctttgctgtgtataatttttttagcttgatgtgatcccatttgtccatttttgcttaggtttcgccacttttaaggtattacctaggaacaatctttgcccataccaatgtcctgaagcattttgaactgggacacttttgaaagtgaaggaggtgtcattaataattacgcaggtcaacaggcatcaagtggactgtcctgatcatcctagccccaggcttgccataaggatatttgggatttgtttgaatcgggtgtggtaagacatgcagggattaaaatgactgtcatgaaggaagaggcctccgcacaggtccctagaaacaggaggcgtggtgccccagtcagaggccaacagggaagcactgggtttagtccggggtcaaggagagtgggaatctatgggcaagagcctttattgaggtttctgtgaaaagcaacaggcaaggcaaggtaaacaggcctaagatgagctaatttgaataataggagagggtctggggcacaggggctgcccaggtgtctggcacctggccctgggtgattagggcaggtgagtagtgatcatgagtgagagccccctggagggggtcactcagggtgtaagctctggactggttggtctgtgtcagaaaagcatgggcttgggtgacttattcactgtccttaggaattggcaacgctgggaggggcagcaaggccccaaactgtcagagcagcagaatacagaaaataaaagggatggctaatatagggactatcagagtcacccaacaggctttttcataaagtccatgctctcttcccacccccgagagttaagtccatgctcccttcccaccccctcccccaggtaagaatgactgcctgagtgagccagtgctacccatgtacacgtgcacacaccaggtgcgtgtggaaagggagagattgggagccagggctttgcctgctgcctccccctgcacccccaacttatactcacttgacacatctaatgcctcaaatctaagtttgtgtccttcgcctgctggactggatcccaccgcctgcctggtgccacagtgactcctattttctcgttcacctggaatgccttccccctccacatgtcgaagacccagctgtctcaaggccctgctacaaggctgtttcctggaaattcagcttaggcctctctccctgcctgagtcccagccgcagtttacactccctcccagcgccccagcctgccttccaccatgtccacctctcctatcagtgtgcgcttcctaagcagctcctctggggcagagagaggtgtagacactcttagaatgaacaatgctgcccacctccagcgtaaggcatggtgccgatgtgccagtgccttactccctggcagcatagtaaatgggagcagaagcctctgggaaacacgctgtcttagcctagtgtttcccatagtaggttacagggcatgtgctcttcctggggtttgctgaactgcaaaacttctcacagcttagatactgaggagcctgtgatgaagagattctccttagggcattgaaaacctttttttttcttttctttttttttttttgtaatttatgtacttgccctcttttttctgagactcatgggactggtggtcttgaaaagcataaatgtctaagaaaggtgctttcaggagactgtagggccccgcttaagcaagtggctcctcccgcagactgcaggtcatgttggctggactatcacctattttactgatgatcctaaacctctgattaaggtgacctttgcctggtgaagctaatatgtcccatctgctccttctctttggtcccccaagggacataaactaagccagcccatccccttgtccttggctccagtcaagctaatcagctttcagtcccctgaattcaccacgcttcttctcacctctgtgcctttctcacactgcctgcttcaaccgcaaatctctctctctcatatacatcacctaatatatatatgaccatatatacagacataaatataataaacacatatgtacatatgtatgaagttggacatgcatgtgtatatgctaggctagaaagatggtagatacataatagatgatatagatgatagatggtggatagatagtagatagatcaatagatagataatagagagataataggtagattatagatgatagatatagatgatagattagatagatgatagatagatagatagatagatagatagatagatagatagatgataggagagattgcttattaggctgccccttttacttaggacatatctagaaatattcactaaatgaagaaaggtaaattaaactagaaagtaagtgaatggatggatggatgggtggaaggatgcatggatggaagtagaatttgtattacacatattggagaattttaatctgataataaacagaaggtgtggcttgacaaggactccttccttgccagactttagtcagtctgctttgagccctcttcttgactaggccgtggcctgttgaactcagtttacggagacttccccaacccttgatgtctaattaagttcctcttagtgattttccacccactgacacctgactatacccctgcaccttggctataaatccttagctgtctttgctgtatgcagagttgaactcagttctatacttgtctctctcccctactgcaaaaacctttcttgccatttttaacaactgtccagtgcaatttcttcttgacaggctgtgaatgtgtacatgtatagacccattctgggtttcacttggctgctttggacaaatcttaggcattgtaggttgtcaccagcacatttgtaacatgggtgtactgcctactgggctctctgaggaaacccttccagaaagggtcagaaggcaattcttaaatgtaatgggtgctttagaagtcagcctagatttgaagtggtgtatcagcactgaagaaacactgtgttctccttcagcacgctggaagaacagcaacgtgttactcattcaagtttgtcctcttggcccttgggctcccagaataaaagatggcttctctagagtcagaagggcaagagaactgtggggaaggaagtgaacgctggctcaactgctagtgcctgcctggttcatgctaagcactctgtccgtgtggcctcacgcaatcttgccagcaacctgcttgggcagatatcatcactgtttcacacctgggtgctcatccatgtggcttctcttcacctggcctcttggcattagtctagccctagcttctttatagcatgatggtggcttccccagggtagcagaagctgctggtcttcttaagggccagaatcaggactggcttaaaaatcatcactttgtctacattttattggtcagggagtgtcaaagctttgcccccaattcaaggggcaggaaaagactccacttcttgaaagtagagcagtgttcctgaatagggaggggaggaattgatggagaccatctactgcctgccctgacccgggacggggacctggtagggattctgctcactgaggccaggaagcaggtattggacacctgtggcatcatggaccggaagtgcattatacctacctgggccaggtacaggtgctgacggactcagaaacagatgtagggattagtggaatccaggactaacctacactcgcttacagtaagcctgcatgtcacaaatccgaggtggccctgtagagggagccacggcctttttctgctagtttgggctagccctgggccacagcagccagcccatcggtccagggggagtctagaatgtgcagcgaggccctccgggtgcttgctggccaagctgcctgggctgtgtggctgtatcacagtcctgaccgcaccctcccagccttcccagaacagagcttccaaggcgaaaacacctcctggctgttctccttccccaaatggctatgttttatgatgtgctaagtttgggggggaaaaaagaaaattcctccagctgtggtgtaatcccatctgaaggcattccagggatttgatttataatctctgggcatgagccgcatgctgggctctgtgagaggggcgcctgtccggggcgctgcagggccagggccgttgaggccctccgggtggagctgcctcctttgtgggttcccagtttccagcatgctggagctgtctccaagcccaagttgtgcatggaacaggcatgcagctaatattcagaatcaggatgagctcactctgctaccaacttgcataatatttatttattcactcatttaacaaagtttctggggactagaaaataccttaggtactgataatacaaaatgaatatggcaaagattgaaatacgtttgaaccaaggttaatatcagaggtaggtattgaaagtttcaacccaacaatcagcttgtaaaacagcggtctgttttctttccctttttttttttttttttttcaagaggggttgaattatttttgtgagggtgctggtaagaggaagctctacatgaattattggagaataacagttctgaaaggagatgtggctgttctaagcccagcctggtgctggtctccccagtgtctttctctcgagaaagaaacaaatgaaagttgatctcagcaaccaggacccatctgggtacccacacctttccttcccagcagccctgcagggttgaggcttgttctcacagcctggaacacaagaatagcatgtgttccagatggagcagaatgattctggcctaggaaagacattataccgaatgggtttcagattcttattggtatctgggaaaggacagacagccacttctacttaaagaaatgcccacaatcccacttcccatcatgggcagaacatgcacatgaactgcaccccacagaggaccctgtgtacagggtggtgcaaggccaacataaaatcaagtcaggccaaagaggaaaagtgtctttgcccaaccgcggtattgtgaagggagccttgcacagctgagtcactattttgattcaaagactgtctatttctttttgtcctccctttgtccctttgtttccttggttgaaattgtgctcggtgagtgaactgtccctggcctgctactagggtcagcagggcctgagtctcatgtcacctttgatcatcattggcagcttctccagctccctgagacagtcagggcagggggctttaaaatctttgagcaactgtatacatagagggctgaatcctagacacagctgacatatactatgacttatttcatttttaaccagtaagtcttgggtctatctgttattagcagaagcttctaagcaaaacaagaattccaaaattcaggaggattagcttgacagatttcccaaacaccttggacagcaacatgagttaaaatgtgacccccatcatcactatgcattcatcatgactagcttgcctctctcaaaaaatggcctgggagagaatgggccagaggtgctgttctatctgtcaaatgtgatctatgtaatcatcctagttggcactgcagaatgaaaactcaaatgtgtctcttctcattccatgaaaaaggaaagctcctgagggttctctgtgacaatacttatgctacttattcttggtcctgtggtggcactcagtttctctaaaagcgaaaggacattatggtggcctacttcacccaaatgctaggagatcacacagtgaaagtcaggtatttgcattcattcactccttagaaactatgtactgctggaaactgaggagcagagacatcccctgcccctacaggacagtgttggtgaggatggatttaaagacaacagagcagaatccgagttgccccctgccctgattcaacaccagctgtcaacatcagctggcagagaggaggaaaagtggcttccaaagacgaaaagaacaatcaaggaagccattcgaagatagtagaaaagaaagcaacagtcagctcaagaatacgcagtagatgaaaactacagcttccacacaggaagagctaaaggagagaggccctcaaaaaaaggttacaagaagagtttaaaagtgagttgaccattttaatgatattgattcttccaatcatgagcatggaatgttcttccatttgtttgcatcatctgtgatttctttcagcgtgtaattaattctccatgtagagatctttcacctccttggttagatgtattgctagatatttttgtggctgttgtcaataggattgtattcttgatttgactctcagattgaacattattggtgtatagaaatgctactgatttttgtaccttgattttgtctgttgaaactttacagaagttgtttaccatttctagaagccttctagtggggtctttaggggttttttggtttagaattatattatctcttatttctttttcttgcatgattgctctggctaggacttccaggactatgttgaagagaagttaatgggtatgggcatgaacagacacttcccaaaacaagacatacatgcaaccaaaaaacatatgagaaaatgctccacatcactaatcactagagaaatgcagccacaatgagataccatctcacaccaatcagaatggctattattaaaaagtcaaaaaataacatgctgatgaggctgtggagaaaagggcatgctcatacattattggcgggagtgtaattagttcagccactgtggaaagcagtttggatatttctcaaagaacttaatacagagctaccatttaacccagcaatcccattactgggtatatatccaaagaaaaataaattattctaccaaaaagacacatgcacttgtatgtgcatctcagcacaatttacaatagtgaagacatggaatcaacctgggttcccatcagtggtggactggataaagaaaatgtggtacatatacaccagggaatactacacagccatataaagagaacgaaatcatgtcctttgcagcaacatggatgcagctggatgccattatcttaaatgaattaatgcaggaacaaaataaaacaaatactgtatgctctcacttacaagtgggagctaaatattgggtactcatggacataaagatggaaacaataaacactgggaactcctacagtggggagagagggagggaggcaagagttcaaaaattacctattgagtactatgctgattacctgggtggtgggatcagtcatatgccaaacctcagcatcacgtaatatacccatgtaacaaacctgcacatgtatcccctgaatctaaaataaaagttgaaattttttaaaaaagagagaaatgacttagcatgtcaatgaaagactttatattaatgacaaactctagtggaatatatgtccattttcttcacttttacgtaataaaatttaaaactttcaaaaataaaagataaatgagtcgacaacggtgcttggggaaaacaattcttgtttgttaatactctccaacccagctcttttgccttccagctggctagtcattaaacagttaaatgaaacaataaagtgtgctcactccctctgtgtatgagaattatgtttccaacacaatagattcctccataacaacactgaatgttaagagaaagtaagtgaaacaatgtctacaagccctccaagtgagaaaaaaatgacacatgaattttatacagagccaaaatgtcacatacatataaagaacttcaattaattgaaagaatgccagaaatcaaggacagtagaacttgtgagcccatcttggaaaaccttttggaggatgaactgtcatcagccaagttatgcataatgaaatttctatatactagctaaagagacaaaacaaatttgtcattacattatgctctttggatatttaattcactcctccttatcctaatattcctaatttcataaccagaagctgaagtgatgtcactttatccatgtaagttcttctccaggctcttcaggtgctaatatgcttaaatctcttcaaatattttatagtgtttgtttttgtcgacaattggaatatgaccatgttcctgcctgtcctacttattatacgggtgtgtcaaaagggcaagtgtgtcacagggcaagtggcatagcaccaggagatacacacctgcacgaatgtccatgtatctgggtgtgggcaaccagagtgcacatgagaatgagaagggctacttctgtgactttcctgaaccaatagtcccaatagagccaggctagagcaaaaccacagcctccaaacccagaggtgcctcccccagcactgatttaggagcccccagcccatctccaagtgttgtgcggcactctgaagttcctcctcacccccttgaggcagctgctccgtgggtctctggactcctcaaactctgattcccctggcagaacaccctcctggctgcaggtgtggctcctgtcccagcctcaaagcaacaggttcctgtgctcccatcattacagcgaagagctgagggctcttttcttttaattgaatcccctgaggaacgccccccaacaacaggatatccccaggctatctgttcttatcatactcataatgtttggctttgtcatgccattcacccagcctcaacttaacacactttccctgaaggtctaaatccagacaaaaatatgagcaacccttctcaacacttggcctccctaacataattacaaaccccttattcatagtctttggctctgtccagagcttaggcagtctcttcatgcctggatgattctcccacacagtatgtgacctgagaagtcaggaatgatcattgtgctctaatgtcatagcaagtggcatgccacctagctctgggggtggcagtcggtgccagaggccctgtcattgtcttccctagaggccataagaactctcatggaaataagttgaccccacaggtatgccagcccagacatcctggtgaggccccagcatgccccagttctcaacggcaagcagctcgggaagtaccgaaaggacccaggcaccatttagttttgtaaggccattcagtaaagctcaggctcttggaaagccagcctctttgattcagtcctttgttgctactcgctttaatgtttacctcattttctgcttcatgcagccagaattactggtaaataagcccttcagcaaccgtagagtcttgtgctctgctggagatgtatatgcttggagaatgaaatactgtgaacatacatatttcagtttggactgtgaaatgccttctatacatctgatttgtaagagagatggttctgatcgctaacatctcagtggtgatcctgaggagaaaggcttgacagaattttaaaggtgctctatggagtataattaaccaaatccaccccccctccgtatctgaaaaagaattctggcagtgttaccagtgaggaagataggttcttttgcataaagggacgtttagttgtttccctggggttattatttccaagcctggctgtgtgatggactcagtttccccagttgcattccaatccattcttcagaccagtccaaaacagtacttaacttataggagagaaacagtgttttaccataaaatgtgcttctgttgtaagtttgctgtagctatgccctagcagattaaggtaattcccttctattccaagtttactaaaattttttatttttaaaatatagaatggatatcaaatttgattcgaattttttttctgcatctattgaggaatggctcttgggaacaatattttctgagctcttgcatgttgatttcaattttcaccctgtgcatcaaggtcagtttttctagacataacatattggctcataaaaatctttccttggacatcttattattccatcttcttttgtattaaagcattactcttaaaaatctgataatcatctaattttcttttcctcatattcttttgcgtaaatcctcccccctccccattttctttcttcaaactgcagcaattttacttaaaatttattaaaccttggtattggtcatactcatttgatggtttcaggtatgtactatgatacttcaacatataattttaaaaacaattatttcaggaaaattttctttaattattactctaaatatttcttgaattagtgaatttgttctgaacccttgctttggtttttcttctttaaactttctgttatctatctactagtcttctttacctatcattgatccttcttatgctcttaaatcctgttttctttctccattttgttttgaaattattcctcttaagctttctatttattgtaaagcatcagttatcaatttttttgtgttccttctagtttatagattttatttctaatttttgtttctaactctttcttgattttcatactgctttaaatttttctagttctgatttttgttattccatcctgttttatgcaattctcctattgtctttaagctcattttgaaatagtaggatatcgttttctgtgacttcccgagctgcttgccattgagaactgtgttttgagtgtatctttctggtgtaccttcattgtttgtaagggatgctattcagctcctcagtcttttttttttcttatggtaacttgtacgggatttgatcataatattttctagtgcttgtttccatgtgaatttggatttcctgaactaaacttgacttggacagacagctcttataagttcactgagcttgctttctgaggttttctggctctattctcctcaatcacttttataggatcttctcttttctttatcccattctctccattctctcctcaactttgattctaaggtttctcctcagtgtgactctgttctggaaaggagccctggctggtcaccttttagagcagataagagctacactgctctaaccccttcaggccctaccatgtactcctcgcacttttccactttgaaggtgaaattaaagggatacaaagaaatggaagaacattccatgctcatgggtaggaagaatcaatatcgtgaaaatggccatactgcccaaggtaatttatagattcaatgccatccccatcaagctaccaatgactttcttcacagaattggaaaaaactactttaaagttcatatggaaccaaaaaagagcccgcatcgccaagtcaatcctaagccaaaagaacaaagctggaggcatcacgctacctgacttcaaactatgctacaaggctacagtaaccaaaacagcatggtactggtaccaaaacagagatatagatcaatggaacagaacagagccctcagaaataacgccacatatctacaactatctgatctttgacaaacctgagaaaaacaagcaatggggaaaggattccctatttaataaatggtgttgggaaaactggctagccatatgtggaaagctgaaactggatcccttccttacaccttatacaaaaattaattcaagatggattaaagacttaaacattagacctaaaaccataaaaaccctagaagaaaacctaggcattaccattcaggacataggcatgggcaaggacttcatgtctaaaacaccaaaagcaatggcaacaaaagccaaaattgacaaataggatctaattaaactaaagagcttctgcagagcaaaagaaactaccatcagagtgaacaggcaacctacaaaatgggagaaaatttttgcaacctactcatctgacaaagggctaatatccagaatctacaatgaactcaaacaaatttacaagaaaaaaacaaacaaccccatcaaaaagtgggcaaaggacatgaacagacacttctcaaaagaagacatttatgcagccaaaaaacatacgaaaaaatgctcaccatcactggccatcagagaaatgcaaatcaaaaccacaatgagataccatctcacaccagttagaatggcaatcattaaaaagtcaggaaacaacaggtgctggagaggatgtggagaaataggaacacttttacactgttggtgggactgtaaactagttcaaccattgtggaagtcagtgtggcgattcctcagggatctagaactagaaataccatttgactcagccatcccattactgggtatatacccaaaggactataaatcatgctgctataaagacacatgcacatgtatgtttattgcagcactattcacaatagcaaagacttggaaccaacccaaatgtccaacaatgatagactggattaagaaaatgtggcacatatacaccatgggatagtatgcggccataaaaaatgatgagttcatgtcctttgtagggacatggatgaaattggaaatcatcattctcagtaaactatcgcaaggacaaaaaaccaaacaccgcatgttctcactcataggtgggaattgaacaatgagaacacatggacacaggaaggggaacatcacactctggggactgttgtggggtggggggaggggggagggatagcattaggagatatacctaatgctaaatgacgagttaatgggtgcagcacaccagcatggcacatgtatacatatgtaactaacctgcacattgtgcacatgtaccctaaaacataaagtataataataatgaaattaaaaaaaaaaaaaagaaagtgagcaatgcccatccagtttcagacgccatcctcagcttagccccaccacacctcctagtaaatatctgttggatctttaggctgtgttcaggtctatcagttggtaaataaaacgggtccttcaccagagtttgagaagcattgctgaaggaatcagcagagggagagatgagtgttagaaggcttcatagaagagatagttcttaggccaggccctggagggcaatcagggttgaagtgaatgttgaagttcctcagtgctctgcccttggcctccatctcactttgtttgtggagcttatccattcccatgccctcaaacatcactttcaaggcaagcattcctccagacctgagttttcagctcaggaatcttttttaacatgaaacttgtagagacacttgcataggtataatgaattcagcatgaaccaaacaagtgcatgactttctccccaagttttgtcaatgaatctcaaaagttttgttgcgtttttattttcgttcagttccaaatattttgtaacttctaattttttctctgactcataagttatttagaagtatgctgtttaatttccaaatattttggaattttaaaaatatcttcacattattgatttctagttaattccataatcatactttatatagttacattcttctgaaatatagtgagactaatgacccaaaatacagtctcttttggtgaatgttctatgtccgcttgaaaagaatgtgtattctgctgtagtttagtgttctgtaagtatcagttaggtcaagcaggttggtagggttattcaaatcttttacgtcttagtttctgtttacttgttctatcaattacttagagacaaatgctgaaacctcaaactctaattatggatttgcatatttttccagtttgatcttatatatccatttttgtttcatgtatttgaagctctgtatttgaaatgctatccttagcatacagcaaattcacaaatataaatgagtctgtaatgctcaactctattttgttccatttatctatctatatatccatgtgccagaatcagattgttttaattactgtgactttagataatactttgactatcgttaaggcaaaccttttccctttcctccagttaatttttctttctcaaaaatatcttagctcttttcatacatttactgttcatttagaatgtaagcatcatctgggcacgttcttgttaagtttaatcttaagtatttcacatattttataaaatatacattttatatatgcctgttgctcaaagatatttttcctgttgaagatacagaacaggggttggcaaaaattttctttaaagggccaggtggtaaaaattgtaggctttataagacatatgatctctgctgatactattcactcagtcatcgccataatacaaaagcagccacagacaatatgtaaacaaatgggcataaaactttatttacaaaaaaaggcaagaagtcagatatggcctgtgggccatagtttgctggttgtagataaagagacagactaatagatatagagaaagattaatttttacatagttatcttgtatcttaacttcataataagtttgctaatactatttttgagttgagtctattatttctatgtgaacaacgtatgaacaaaagatcattttcttctagctttccaatatttacagcaattattccacttttgtaatcttactgcattggctagataactctggagcaatactcagctactgtgctaacaggaggtattgttttgttaatagggggggctctgtttttcacctacaaatttgatgttgctgttggtttctaaaaaatgttatcacgttcaagtttcagatacaatgcttgtattcaatcttttaagatcccttctaattcaaattgtttaattatgaagtaattaccagtttttgattgaggctatagacaaatgagtgttccagtgagcaatccatcacccccattgaataccaatgacttctttttacttaatagagaccttctgaatcttcttgttcaattacatgaacctcaagacaacatagaagaaaacgaattcttccgaggaattagaaaaaaattaagtaggaaataaaagtattttgctttagactttttaaaggtgttttcctttgaggtttttcaataaaaataaatcactaaaataacttttgagtgctaaaggtaaatttagctgaaaattcaataatgttctaaggagattgggggtaaaaggtccaaaggaagataaattactaactctaatatggaagaaaaaaatctaagatgtttatttctgaaaagctttggtctaacatgtaagcctcaagaacatacaactttaaaaatatgtatttaaaattgaaagttaataaatatatatatgcttatatttaaatattttaaaacttcctttaaattagcattcatatactcacaaaggtgtcaatgaaaatttcatgttcacattgcaggcagaaattgattcattattgatataaaattatttcaatcagtcaaaagttttcactttggcattcaccttccaagaatgaagtgaaaacaaatgcaattagtatttccatattcactcctttaatttccctggaaaactaaaaattagtccagctgtaaaaatatgaggcacacattaaagaagagacatgtttaacatcaagcattgtggaatttttctttacaagacgatttcaaggcccagataaataaaaatacttcaggcaatacacagtaaatattttattttaataatagcatagaattcttctgaagaaaattgttatacattatagctattattttacagtaacagagagaaaataaaattagagatacaaatattaaaggccaattatcaaaatgaaattaacacagattattattcatatgaacaatgtaaacagaatcatctatttgatttaacatcaaatatatttttggcatataattatttttacaatgagaattattaattattcaaccaattcaaatatactcattcagccaaaagaacaaaataagcctcttagaaattcaagatttatagattgatattaaacattttctcaatacatagaatattctgatctccattgagttaaactgtacaaacactcatatctattgttttatagcttataattaggtatagcttgtcaccagaactccttgtccaaaatatcactattaattgtacgaggcaaagtcctataataaaattactgtaataatggccacatcttttcaaaaacagaatatggaagtttccattttcatgactatgaatctggttttccaaaattgggttcccaaatccagtttctaaatgtttcaacagaggtgagaaagtaaaggaaataaatgatttaatggaactctggaaaaaaaactatcatagatcttagtttgaaaaatacatcaaacatgagagataccatgaatgactcagaattatataataatgcctatatcaaactttattagttagctaaagggcaaagagtaagaggcaagttaaaggtaatacttgcttttaacaaagcagactaagtaatatgttaagtgttagggtgggataggaaagaactcaggcatggcaaaagtctcctcttgggctttctatataaacatctattttagttttggactgttcaccgagaggagctctccctatccatgaaatgcttcccagaccaacaggtcttggtctagcagctgtaggaaggcagcagtatgaaaatgtaggaaatggaagccaatttgtgtccaaagttagtccaccctaactggactctttttaaactgggttattcaaatgccagcaaaaagtacaggctctagctaaagaacatgaatagacatctgtcttaaaaatgcctggaagaggtcatgattattggccttatgttctcccagaataagaacttacaaagtcctggaaatcctcagctctctccagccacctttccaaataaaatcttaatgaatatattttaaatcctttattgggctctgtaatcccttcaaccaaatagccaagctgcaatcgttttatgtaacatctgtttcactggaaaatgtgggaagttattttgatattgtctagcaagatcaataagtaaacactgatcaccccaagccaaatgatattgcccttcagggagcttttagaaagaaaataaactgataaaccaagaaagcagattgtatgcatagcaaagcccttcagcacagtgcaaacatgttctttatgaggaggtgcaaacccacttggtaatttcaagtgagaggcaacagaagtctttcttaatccaaagtcagaagtttccgaagaacttcaagcacaatatcgtaacaaaagtgatactgctcctatatacatatatataaaaaacaacagaatgttaagtaattgaataacagaatccactttcagaaaacacatttgtaattttcagccacactggaaagttcctaaaaagagcaaacatttaactataaacacttaagaactttacgtgaatacatttttaaaactatgaggaagataaatgatcaaaatatagctcttggcctagaactagttaccttaaggcttaacataactgttttttttatcattatccatattctattaatctaccctcccaatgactactaacaaatctgtgacataaatgatgtctttttatgacgtcctgataaccttgacagtttagtggcaagtaaatatctcaaactgctatccagaaatgttttaaaaataactttagatgttacttaaatagcacggcattatggacaaggcatgtgtttggacacgaggagacctcaacttcaggcttggctcctccccttctatctgagtgaccccatggagcaggctttattgctctgaatttgaagtacttggtcaggaataccagagaatcagagcaaaactaatgtctacctcaaacagtaggaattcaatgagattatgtcaataaaagagcttttaagtggtaaagtgttatgcaatgttaatctttatattcattattcttattattatgtatgtggtgaaagcttaccttcgtttgaaccatgccagaacgttgttctctcatttgggccactatatccatgatgttgaactgtaataagatgacagtaattttgtatgatccacatgggggaaaaacacaaattcacagattgccaaaaagggtgaaagagatgtcaagatttaatcagaaagatctcattttcactcacaagaaaatgtgctatttttaacttagcccaatggataaggaagactattttaataggttttcaggagaaagcaggaagcaatcattcataataagaaatgctctccaaaataagtaataaatttgcccttgtgtgtccctgtttgttatccaaaggcagaacttaaagcagcactgtaattctggaaaggcacagaagactttctctggccccaacaatagcatatctgtttcttatatgaagatccctgtcaactcacacggaaactgggagcaacagtcgacccaacactagattccagactgtgtgtggacaccagtacagctgggtgtggtcattgagttggtgcaggcctacaaaggtctgttgctggtccacaatgagtcaagaaactgggagtaagtgctcagaaactcttatggcaatttgacactggcacagcactgagaagtgtgctcaactgaacaggatatagaccagctcaggtgttgctgaacttgcctggagagtcacatgtgggacaagctgagaatgagtcgtttcagcaagacattgtggacacatgtaaatgttgtcaactgtaaccccaaagcatataaaaatagaaaacaataagcattcctttattttcatagcttatcatttttataattaaaatttttaattaaccctttgaaaaaacttttagttttttagagacagggtcttgctctgttgtctcagctgctggagtacagcggtgtcatcatatttcactgcaatctcaaactacaatcctccctcctcaacctcctgagtagcaagaactataggtgcgttccaccatgcccagctaacttttttatttttatttttgttacccaggctggtttcaaactcctggcctaaagtgatcctcagccttggcctcctaaggtctgggattataggcgtcagccaccatatctgccataaaaaaattttattttataatacagatatacaggaagttgtacagggtggccctgtgtatctttcacccagtttcccagatggtgtcatcttgtttaacaagatataatatcaaaaccaggaaactgacattgggacaatccacaaagcttaattcagatttcaccagttttacatgcaactgttagtgagtgtgtgagagtgtgtatgtgtgcatgtgtgcatgcacagagctccatgcaattatatcatatgtgaagattcatgtaactataaccacagtccagatacagagctgttccaccacaagacttcctcctgctatccctatagagtcacactcatccaccccaatctctaacccttggaaaatagtaatctgttctccttctctatgcttttgctatttcaagaagaaatagcaaaattcactatatgaataaaattgcacaatagctaaccttttgtgattgacttttttcccacccagaataacttggagatccatccaagttgttggtgtaacaatagtttgcttccttttattgctaaataatattccatgatgtggatatgtgccactttatttaaccatcaatttgttgaaggacatctgggttgttctggtttttggctactgtgaatataatctgctatgaacatttacatacaggtttctgtatgaacataaattttgattaatctgggataaatgccccaagagtgctattgctgggttatatgtcaactttagttagttttgtttttgttttctttccaagaaactgctcaattgttttccgtagtggctggtaccagtctacattcccaatgtctcatacatatgggtaatgtatgagcaatacagtttctccaaatcttcacataattctccaaatcctcaccagcatttccaaatcttcatcagcatggggtgctgtcactatttttacataagcctttctgataggtgtgtaatgctactccatcctggttttaattagcatttccccaagggctaatgaagctgagcatcttttcacgtgcttgtcatctgtatgttctctttggtgaactgtctgttcatgtcttttacccatttctgtttttcttttttttttaactattgatttttgagggttccttataaattctagatccaaggcctttgttggatatgtgccctgcatatagttactctctagcttgtttttttttttttatcctcttcattgggtctttcacaaaacataaaattttagtttgctttccctctgagatcagtgatggcaacaacgcctgctctcaccactcttattcaatatagcacttgacattttagtacagcaataagaccagaaaataagtaggatgtatacagattgtatacagatcaaaaaggaagagacaaatctatatgcacatggcatgactgtctatgtagaacacactaaagaatctaaaaaaaaaaaaacctacaaaacctctaagagctaataagtaatttcaacaagatcacagggtacaagatcaacaaatgaaaatcaattaaatttctacgtactagcaatgaatatgtggaaactgaaagtacaaacacaataccatttacaattgctccaaagaaaatgaatagggtaaatttaacaaaacatatacaagatctatacactgaaaatgacaaaatgctgatgcaagaattcaaaaaagacctaaataaatacacttaccatgttcatggattggaagattcaatacagtaaagatatcagctctctccaattaaactacagatttaaagtaatttccatccaaatcccagcaagttttgtgtagatgtagccaaactaattctaaaatttattagagaaagcacagaccctaggatagctcaaacaattttgaaaaaggagaataacgtgggaggaatcattctatctgatgttaaagcttactatatcactacaataatccaaagggtggtaccggcagaaggatagacacactaatcaatagaacagaatacggaaccagaaataggcccatacaaatatgcccaataatttttgacaaaggtacaacaataattcaatagaggaataacagaattttcaataaatgatattgaaacaactagccatcaataggccaaaaaatgaatcttcacctaaatttaataatttattaactcaaaatggactatggacttaaatgtcaaatatgaacttacagaattttcataaaagaacacaaaaaaattattcaggccctcagctaagtgatgagctgttagacttgatatcaaaacatgatccataaaaggaaaaactaataaaatacaatctcatcagaattaaaaactgtaacttctttaaaagcatttttttaattataatttaagattaggcaaattatggaaatacatttgaattactaatttttaatcagtttactgactataaaacaagcatgactggactgttcagttaagaaaagacacagctttccaaatgtggctgtagtggttaaccaaataatgaagatggaagtgactgcaatgaaatgaagacaaagagttatataattttcacttggagttatgattcctcatatattgagttttatagtcattattgattgtgaagctctaaaactacacttgtgttatttccaaagatgtactggttaacaaagcaaaggaaccattaagacttatttgtaatttacataaaaaataattaattcaaagataaaataattatcttaaagagaattagattaaaaagacaagagaggacttctggttccaaaataacagtgtagaagcaagctggcttcacttctttacaaagaaaaccaaaaccaaatatacagcactgaaattatcaccaacaatatcccagaaatcaaatacgaggagaagacagttcctggatccacagagatgggaaaaaaactctaagtaggcagtaagagaattgggtttccacatctgcaatgcccatttctccaatttgcccagcaccaagagtgcaaaaaatctccacctgattcatgatttctataccagaaaaggtgacatccaggtttcccaccatctgggttacctggcaggaaacctgtccctacctcaacccacaggaagcactacatgtgcctgaagaaagaaataccctgagaagagtcagaaacaaacaggtgaggtgggactaccatccccagccctggaaactctggtctgtaactcagctaaaggagatgccaaaccagagtggttgtttagtagcaccacattgcagaagatacattgcacaggacccctgggcatgaatctctagccacctttcccacactgccatgatatctcctttgagactttccctaattggaatgagcagctctcttattgtttactggagccaaggcaaacttggtcgtaaggtgacatctagtgccaaaaagaaggcagcaacttagcccctcaccaaaaaaaaaaaaaaaaaaaagaaaaaaaaaattcgacaggtaaattacatagaatctataaccaaatacattcaataaaaaacaaaaataagccagacagagaacactggaataaataactaatccttcattcaaagacatcaatacaagatatatatttcttgcacatccagaagaaactgcagtcaacacaaaaccatgacctccccaaatggataaagcaaggaaccagtgactgaccctcatgagatagccatataagagctccctgatcaaaaattcaaactagtattaatagctttgaggaaactcagagatctccaaggtaacagaacaccaattcaaaaatttattagacaaacttaacaaagagattgaaataatttaaaaatcaaatagaaatcttggagctgagaaatatattagctgaactgaaaaattcattacagcctcacaatagcagaatgaatcaagcagaggaaagaatcagggagcttgaaaaccggctacttgaaaatgcagtcataggtggaaaaagaataaaaaagaatgaagatcatcaccaaatatagacaattacctcaaaagaccaaatccaaaaattactggtgttcaagagggagttgaacaagagcaaggggtaggaagcttattcaaagaaataataacaaaactttccaaaatgcaacagatataaatattcaggtataagagcatcagggccgggcgcggtggctcacgcttgtaatcccagcactttgggaggccgaggcgggcggatcacgaggtcaggagatcgagaccatcctggctaacacggtgaaaccccgtctctactaaaaaaatacaaaaaaattagccgggcgtgatggcgggcgcctgtagtcccagctacttgggaggctgaggcaggagaatggcgtgaacctgggaggcggcggagcttgcagtgagccgagattgcgccactgcactcccgcctgggccacagagcgagactccgtctcaaaaaaaaaaaaaaaaaaaaaaaagagcatcagagaacaccaaacatattcaacccaaataaggctacaccaaagcataaaataataaaactctcaaagctcaaggataaagagaggatcctaaaaagtagcaggagaaaagaagtaattaacatataaaagagctccaattcatctgacaattgactctcaacagaaatcatataggccaggaggaagtgggataaattttcaaagtgttgaaagaaaaaaaaaacctgttatccaagaacactatattcagcaaaggtacttttaaatatgaaggagtgataaagtatttttcagataaacaaaatctgaggattcaacagcagcagacctgacttacaagaaatgctaaagcgagttcttcagaaggaaaataaaaaaatacaaaaaaccacatacacattcaaaaagaaaacttttcaaggcataaaatccactggtaacattaacaacatggacaaaaccagaatactctattattgtaatgatggtgtgcaatccatgcctaactctggtatgaagctgaaagataaactcataaaaagccgtaatagctacagcaacctattaagagaaaggtaatataaaaatacacaaatttagataataagcagttgaaatgtggtggggatggagttaaagcatagagaatttttttaaaattttttctttgtttctattctttactttgtgatctaagataagttgtcacttctttaaaatagcttattgagatccactcaaggcaaaaagaactgggaagtccccacagctgtctgctgggcagaaaaccctaggctatgggtgccacatcagctatacacccacggcaacaccgccctgcctggagatctcacacccctgacctactgcatcaacaaaccatctgtaggtctactgcacaattagctctgactcccaagcacagaggatcagcaggcctccagtgtgctgtggatctcctggtgacctaatctttggctcgagctgccccaagggaggagagagcacaggctgccagggttccccttggggttaaagagatgtgggcatggtgccagtgactggagggggctcccctaaggcctggaaatggacctggcaggggatcatcgctaccccttcccaccacccccactgctgcaaatgtgctggaatacaaaagagccatgtgactgagagtctatttgccggccattattctcaagcaccatctactggattgaagcctaaattacaacaccccaaactcttccagtatacactgcctgtgaaatccagtgccagaatctagccacaagtattaataaatatcccatacagagtgttggccctctgaaagcacccagaaataaagccaactgactatactcagcttatgctacagtcaaacccacaagggatacaaagaatataaaaacaaaaagcctcatcgaaatgatagcaaattcaacaagataaaagaacacgtgccctctcagaagagaaagatttaatgcaagaactttggcaattcaaaaagtcagtgcctccttatctccaaacaattgtactagctcgccagaaattgttcttaactaaattgagatggctgaaatgacaaacatagaactcagaatctgggtggtaaggaagcttaatgagattcaggagacagctgaaacctaatccaaggaatttggtaaaatgatccaagagttaaaaagttgacaaagccattttaagaaacaaacaaactgaccttctggaattgaaaaattcactacagaaatttcataatacagttggaagcattaacaacggaatagaccaagatgaggaaagaatctcagagctcaaagattggtccttcaaatcaattcagtcagacaaaaataaagaaaaaagaatttcgggccaggggtggtggctcatgcctatgatcccagcactttgggaggctgaggtgggaggatctcttggggccaggagtttgagacctgcctggccaacatggtgaaaccccatctctactaaaaatacaaaaactagtgaggcttggtggcacgcgcttgtagtcccagttactcaggaggctgaggcatgaaaattgcttgaacctgagaggtggaggatgtagtgagctgagatcacgccactgcactccagcctgggcgacagaccaagactctgtctcaaaaaaaaaaaaaaaaaaattgaaaatgaacaaaacctccaagaaataagagattatgtaaagagaccaaacctatgactcactggcatttctgaaagagaagaagagtaaacaacttggaaaacatatttgaaaatatagtgcgcaaaacttttcccaatctcactagagaagtcaataggcaaatttaagaaattcagcaaagtcctgtgagataccatacaagatgaccatcctcaagacatatagttaacagattcaccaaggtcaatgcaaaagaaaaaatcttaaaggcagctagagagaaaggtcagcttacttacaaaggaaatcccatcaggctaggagtagacctctcagcagaaacttacaagtgagaagaaactgtggacctattttcagcattattaaataaaataaactccaaacaataatttgatattcttccaaagaaagcttcataagcaaaggagaaataaaatccttttcagacaatcaaagctaaggaaattcatgagcactagaccagtcttacaagaagtccttaaggaagtgctaaatgtggaaatgaaagaacagtacctggcaccacaaaaacacaagtacatggcccacagacaccataaaggagatacacaatcaaatctacaaagcaaccagccaacaatgtgatgacagcatcaaaatctcacatattgatataaaccttgaaggcaaatggtctaaatacccaacttaaaaggcttaggatggcaaaatggattaaaaaaataaggcccaaccatattctgtcttcaagagacccatctcacatgtaagaacacccacaggctcaaagtaaagggatggagaaagatctatcatgcaaatggaaaacaaaaggaaagcaggggtcactattcttatatcagataaaacagactttaaaccaacaatgatctaaaaggacaaagtagggcattacacagtgacaaagggaaaaattcaaaaagaagagttaactatcttaaatatacacacagctaacattggagcacccggattcataaaacaagttcttctggacctatgaaaagacttagtcacacaataatattgggagccttcaacacccaactggcaggattagagagatcatcaaagcgaaaaattaattaataaagaaattctggtcttaaattcaacacttgaccaattggactcaataaatatctacagactagtccactccaaaaccataggatatacagtcttcttatctgcacatggaatatactctaagatcgactatatgctcagccataaagcaaatctgaaaaagattaaaaacactgaaatcatctcaagcatactctcagaccacagtacaataaaaacagaaattactaccaagaagatctcccaaaactacacaattacttggaaattaaacaacttgctcctaaatgacttttgggtaaacaaatgaattcagaaatcaaaaaaattctttgaaattaatgaaaacagagacaaaacaaatcaaaatctttgggatgcagctaaagcagtgctaagagtatagtttatagtgctaaatgcctacatcaaagaagttaggaagatcttaaatgaacaacctgatgtctcacctagagaaactagaaaaaaagaacgaatcaatcccaaactagcagaagaaaacaaataaccaaaatcagagcagaactgaatgaaattaagatggaaaaatgcatacgaaagatcaacaaacaatttttttttttttgagatggagtctcgctctgtctcccaggctggagtgcagtgacacaatctcagctcactgcaacctctgcctcttgggttcaagcaattctcctgtctcagcttcccaagtagctgggactgcaggtgcatgccatcacacctggctaatttttgtatttttagtagagacggggtttcgccatattgatcaggctggtctcgaactcctgacctcaggtgatccacccgcctcggcctcccaaagtgctgggatcacaggcatgagccaccgcgcctggtctgttttttgaaagaataaacaaaattgatagactgctagctaaacaacaaaaaaaggaaaatctaagcccaatcagaaatgacaaagatgacattacaactaatcccacagaaatataaaagatcttcagagattattataaatatctatgcacacgaaaaatagaaaatctagaggaaatgagtaaattcctgaaaactcccaagattcaaccaggaagaaattcctgttcaagaaaacctgaacagaccaataatgaattccaaaagtgaatcagtaataaaaatcctaccaaccaaaaaaagccctggaccagacggattcacagctaaagtctaccacatgtacaaagaagaactgctaccaatcctactgaaaccattccaaaaaattcaaggaggagggactcctctctaactcattctatgaagccattatcaacttgataccaaaatctgacagagacacaatgaaaaaaaagttcaagccaatatccccgatgaacatagaggcaaaaaaaaaaaaaaatcctcaacaaaatactagcaaaacaaatgtaacaacacatcaaaaagataatgcactatgaccaagtgggatttatccccagaatgcaagtataatttgacatatgcaaatcaataaatgtgatatatcaacagaatgaatgacaaaaaccatatgagaatcttaatagatgtggaagaagcatttgataaaattcaacatgctttcatgataaaaaaaaaaaactctaaacaaatgaggcatagaaggaacatatctaaacacaataaagacgatatatgacaaacacacagctaagatcatactgaatggggaaaagctcaaagcctttcttctaagaactggaaaacaggtcaagaatgcccacttttaccactcttattcagtataatgttggatgtcctagccattgcaattagtcaagagaaagaaataaggggcatccaaattggaaaaaaaggaaattaaattgtccttctttgcatgtaacatgactatatattcatatattcatatatatatgtatatatatatatatcccccaaaactaatgactctaccaaaacactctaagaactaataaactaattcagtacagttgcaggatacaaagtcgacatacaaaaatcagtgatatttctagactccaataacaaactagctgaaaggaaataaagaaggtgatcttatttacaatagctattaaaaaaaaaaaacacctaggataaatttaaccaaaaaagtaaaagacttctatgaggaaaactataaaacactgatgaaagaaacgaagaggacagaaacaaatggaaataatcctatgctaatgaattggaaaatggaatactatgcagccataaaaaaagagtgacatcctgtcattcacagcaatatggacaagtctggagaacattgcattaagcaaaacaaggcaggcacagaaagataaatactgcatgttctcatttatatatgagagctaaaaaatcaaactcatggaagtcaagagtagaactgtgggtattaaagatgataaggaaaggttggctaacaaatacaaaattaagctagataggaggaatgagctctggtgttctgcatcactgtagggcaaatatggttaattataatttattgtatatatttaaagagctaggaaagaagatttttgatgttcacaacacaaagaaatgacaaatgtttgaggtgatgcatatgttaactaccttgatctgatcactacacattgtatacatatatctaaataccactctctgtaccccacaaatatgtacaattattacatgtcaactaaaaataaaaggaaaaacaacatagatggaatcattttaacagataaaacttgagaataaaaataatcataaaggaaatattgtaatcatcacatctgattcctgtgtctatctcttagctggttccaaattaaaaacaaaagtaaaggattgtgaattattgactcaaactcaattatattattatgtttattttgcaaatgagaaaactagatttgagagaggatgagcaatttacccaaagtcaccaaaatctaaagtatgtggcaaaacaggcagtcaaacagggacccctcattaactcagaagtctacattttttctcacattcttatgtgcttgtcacttatattcattaaaaacaggcacattccatcaacattctctagtaagagtctaaacaccccgtgtaagatacagggaaggaaaaggaaatggaactcacattttctgtgtatctattatgttccagacactgtcctaagccattatttacaatacatactttaatcctcacaaacacccccaggaacctgcagcaagttcggtgagaatcaggtatccaaagctcatgtgcttttgatttactaagttgcttttgaagaccaaatattagtcttccaaatgatcaggctattaaatgtagtgtgtaaacaccaacagcatcagtgtatctgcttgattcacacacttactgaacagttctttacgatggcacagaacacgacatccacacataggaacacccctgtccggcctatgccggcactgcagtgaacaaccatgggtcctgtaaggtggctcttccttgcataacgaatatattttatgaagctatctgctgaggcaggagtgccatggtctggccacttggtgaactgcaactgttttacagagtgactagttcccgtctgttagagaaagaaacagagcgagaaagacatttattgatttcttatattagagacctcacgccaacttctaatattcaaatgataataataatggctatatggtattaccttggtattatatagaactttcaaaaagtactcaaacctctttttgatgtttataagaattctggaagttgctaggaatagaggttttctccattttacaaaggagagcacagtaacaacaataaaaataccagtattaacaggtaacaaaaattaagcacttgctatgtggcagttactatgctaggggcttcacatgaattctctcctttaatcttcacatcaaccatgtgagataggcaccattttatctccattttacagatgaaaatttaaggatgagggggacgagagatgtatgctaggtcagaaggttcacacgtttagagctggaactgtaatgtaggtgtcttgaattctaatctaccatcattcttctgtaccatgaggctacaggaaaaccaagatttcaaaatgcttagagtgagagatggactgtcatgttaggaataagaccaaaaggcaaagtatcttagtttagaaatgacatatgaaatttaattaagacatataggtgtctgacaagagaggcaccgatctcttccagcgatgaagacagggtagtcaatgaccatgagagtagattgtgggtcccactattgtgctgagcccccttgaagtggagtcatgaaactcttcccagcattgtcagataaagcactttgaatttacctatatctcatccaaagggatcatgaccctttcctcagtgtggggcccttattttatcacacatgggaccctaatggaagaactcaaaatgagtttctcacttctcctatgcttctcccgaatgcacctctttttcctaagctttctgaataaagatgctagtgctcagagctctattctaatccacagtgtcgactgaaatttgtgatagttaattttatgtgtcaacttggctgagccctggtatccagatactaggccaaatattattttgtgcctctgtgaaggtattttttaggtgagattaacatttaaattggtagaatttgagtaaagcaggttattctccataaagtgggttggcttcatctaatcagctgaaggccttaagagaacaaaaactgacctcccatgagcaagaaggaattctaccagcagattgcttttggactcaaactccaattcttccctgggtcttcagcctactttcccaccctgcagatttgccaaccctccacaatcacttgaaccaactccttaaaattaatctctctctctggatcagtcccataacctgtattcagggatctcaatgttatactgctagaaaaatacacataatcacatattttgttgctactacaaatgtatgggtcaaacctcagcatcactcagcaacccttttcctggtgattgtgctccaatcaacttctttggtgatgactccaaaactcaccattctctgcaagtttcctgttcaactcctattcccttcactcgtgttaacacatgtatcacctacctgccaactgaatccactagagcaatctaactcattgctttctcctataaaccattccttttctgttttctaagtctattagaccaaggaatccatgaattattctagaccaatgcttctcaacagaacttcctatactgaagcaaatgtcttaaatagtggcaatatagtagccactatcaacatgccactcataagccctaaaatgtggctacttgcaggtgaggaactcaatttgttattttacataaatttaaataacttaaatttaaacttaaatatccacatgtggttactgtattgaatatattttcaacccctcctctgtcacttataaatcataagtcataagtcacatatgtctcccaattttatctgcaaaacacttgcgtctgtgctttccacccccatgccaacagccgtagttgatcatgtcacttactaaaattcttcaatgtctcccaattatcttcataataaagttcatgctacttagctgaaatttaagacatttcacattctagctggcccctgcttacttttgagaacctcatctcatcttttattactccctggcactgaacttttacatttcagaaacacttaactacttatatttgtctctacacacaccttatgctattttatattttgatcatctactttctccctccatctttttcatttgcataattctcaaaacaaatgccacctcctccagtaaacctgtctcaaaaccccaagtaaagccaagtgtttaccttctgagccccaaagtgcccaagacatatctcaacattatcactgaacacggtaagttaggtatctatcagtgagtgtaaccaacctctccactattcggtaagtactgatagtgcctggcccagtgattagcatactttaaggactcaatacgtatctgctacatttggcagaggcaggtataacccagaatcagacaacttcaacagtcactctccctgccccacctctcttttccaattttttcttctccacagaatctggttgaggagaagtagaagtggtggtggcttctggtaccagggacaagtaaaaagttacttaagaagtatcatcgatcgattttccatcctactcctaacttctagttctaagacatctgcttatgtggtgaaacatatatctaatactgatgtttaaaaacttacggacttctccacaacttgaaacattcgaatgatgaaatattgaagtatctggtagttctccaggaatacacggaagtgtttcaattccaatggcttcttcagagaaatgggccagtaatggtagcatttgataattccaccttctatctctctggttatcatggcaataacatttgaattattttccaacaccatttgccaaaagtcatctatggtgctcagcagtggtccttgagtagcgatataaaaatactcttctccacaattgactattctaatataactagcattgatgtagtccttgctttttccaagaggaacgcgtgttgaatcatctattacagaaacagaaacatctggtagataaaggtgggagatacatcacacccagacttcacgaaaggatttcacacatgtaaatccatatatctctttgaccaatagagaagatggcctaggagtttcttttcaaaatggttgagtccatgagtttaaattatttcctccctgaaaactattggcatgacctaagaaatatacaattatgggatgtttatttttcaaatcagtttttaataaatgcagaatgatatcattagcatccaggtacttttggaaatttctgctagaagtggcatgggcaaggttaagtcaagggaagtatcctatagtttgcaactgaacacaacagaggagaaactctttgtgggagtaaatgagtgatattatcctgcaaatctgaaacctgcaaacccagagcagcaggggccaggggaaaaaaaaaatctgatagttgactgcagacaaattctaggattaatggaattccaccactgtccccaaactagacagccatattttatgtccattctcagccttcatctggtgataggacatgttattcaaagcaaagatattgtggcaaaaggatgctaccaagggaaattgctccaagtaatatgggactcatctaacatggactgttataacaaatatgagagggaaaaccagctatttggcctactaaccttcactgctccaggagttccttcttcacctgacacagacatctgaagctctggttccaccaccatccccacagtgagagcagaaacacacacagcaaaggaggcccttctctgccatgcagctctctcaccaataacctctccttactactcagaatcacatggaccacttatctagtaaatatgctgacaagacctgaacaggcatttatataatatctggcagaactcttctcaaattttaacatagcacacagaaactttcccttgtaaatatgaatgaacagaaaaaatcagccaggcgcggtggctcacatctataatcccagttactcaggagactgaggcaggagaatcgcttgaaccagggaggcggaggctgcagtgatctgagaccgcgccactgtacttcagcctgggtgacagaatgagtgagactccatctcaaacaaaaaaaaaaaaaaaaaaaaagctagatatataaagatacccggtatttcaaaaagggagaccattctaaaaaatcacaacaaatattctcctttctataaaagatgataacaccttaaaaactcctatttgtatattaaataaaattcaagagagcattaattatttaaaacaatactttatacctatgtttactaacaaatatgttatattactaaattataaaggtgataacaatggctttgtagggagatctttcatcatatttatgtagatatatgatgatatatgtcatataataataataagcctggcaagtgttcatcacaatgttagcagtagttattacagtatctaaaccatataaattacttcatagtaaaaaaagcattttttaaattttgaaatgagattaaatatgtgaaaattaaataatctaaaataataaaagcttgatttcatataaaagtcacaatcattcaactcaaactcctaaagcaggaattgaacagaaaaacaaatttatgtttagaaaatcagcttaaaaaattttcccagaactcagaaaaaaaagattaaaaaaacctacaataatgattaaaatggtaaaagacacagcgcatacaaggggaatgtaaaaaacgaatttcagaagcaaactgtggaattcactgcagaaaagaaataattcaagtgatcataggaaagctccctaaacagaagcaggagtactaacagaatgcagtgaaacatgcataccaggttcaagcagcatgatacgctacatgtatcaccttgtcaactccaaaacaaacctttgagggaggtgctattatattcatacttttcaaataaagaatctgtacaaagtaacttgttccatattatgcagcaatcttctagactccacagactaggtaaatctagactctggtccaaaaataattccatgctctgttgtccatcaaggaagactcaagtttgcagacagaaaggcctaagtgtcagacaacattaatgaagagagccactaagacccctagaccagcagagcataaggccacaggaacaggaacaggaagcaaaaattatgctaatggatgactaggggtaatggcaactggtgccactcccatttccaccccttgattcttgaatcttggctatggtagaaacagcatcatatattggatgctgacatggggcatgtataatctcctgaagaacattaccccagccctgcaaggtactgccacctagctttcactgtaattgagtcttcaaaaggccattcatccattctgtcaagccagccgctttgagaggataaggaatatggtaacatagtggcaatgaggccattgccacaaggtatttgccacaaagtgagttctttgattacagcaatgctgtatggaataccatgatggtggataaggcattctgtaggtccacagatggtaaattggtgggagcactgtgtgcagggaaggcaaatccatacccagagttactgtctattctagtaagaaaaaagcactgctccatgcattatggaagtggtcccagtgtaatcaacctgccatcagctagctggctgatcatcccatggaatagtgcccatcaggtactcagtgttggtctctgttgctggcagattggacactcagtagcagctgtagccaggtcagccttggtgagtggaagtccatgttgctgagctcatacataacctccatccctgccattatggccactttgttcatgagacctatgggcaatgacacaatgacaggggtgactgggggtatagtctagctgatattcatagagcatgtcactctattcacttgattattaaagtctgcccctgctgagatcaacctttggtgagcattcacatgggatacaaatatctttgtgtttgtgcctatctagcaagatctattcacgtgcctcttccccagaccttattgtcaccaatttttccaaccatgttccttcaaattccctgaccatccagctaagccattaaacatagcccatgaatcagtacacatttatacgtctggccatttctccaagcaaaaaacaaaaaaacaaaaagcaccaagtgcactacccaatgttctgcccactgggagttatttctcttcaccactgtccttcagagatgtctcaaaaaaggggctgtagtgctatagctgtcctcttctggctggtacctttatatcacgcagaaccttctgtagaccaggtccaagtcttctcttcttctgtcagctgatcataggcaactcctcatgagacaacaggtgctggctgaagagagcaggtaatgtagcaggggtgggaacagtgagcatttgggcagcttcttcgtgtaacttatttgtgccttcaggatctgctcaagcccaatgttgtatctaccactttcatttgatggtggagtgctgctgtgtatgcccaactttatggcttggtggcccatagttaagcattctctacttagttctctatgaagcagtctctaccaaggcccagtagcaggccaaaagctgtttctcaaaaagagagtccagagagggtggcaggaatttgctctaaaatcctacgtgcctgcactgtgattcatctaaaggggtctgccaaaggtccaaacagcacccttatctgccaatgacacttcaagcaccactggatctgctagatcatacagcccacgtggcagagaggcttgcatggcagactgatcctgtttcagagccttctcttgttttgggccccactcaaaactagcagcttttcacatcacttagtaaatggaccagagtagcacatcaaaataaggaatgtttcctccaaaacgccctggttcactagccattgtgcctcttttttgcttgtaggaagagccagatacaatttatccttcaccttatgattatctccacatgtcccacaacactggacctctagaaatttcactgaagtagaaggccactgaatttttgttggatatatctcctaccctctgacagacaaataagactaaagcatttgctacttcttgttcactagatccaatcagcacaatgtcatcaatgtaataaacctctgtaatatcctgtggaagggaaaggtgattgagatccctgagaactaaattacaacatagggctgaagagttaatacacccctgaggtaggacagtgagggtgtattgttggccctgccagctgaaagtaaactacttttggtgttcttgattaataggtatagagaaaaaagcatttcccagatcaatagctacatagcaggtatgaagagatgtgctgattttctaaggcaatgaaactatatctggtatagcagctgcaactagagtcaccatctgaggaagcttacaataatccactgtcattctccaaattccatctcttttttgtgtaggtcatataggtgagttgaatgggatgtgatagatatcaacatcacttcatccttaaagtccttgatggaggcattaatatcagcaatctcttcaggaatgtagtattgcttttgcttttttactattttcctaggtagaatcagttctactggcttccactggccctttcctgccataatattcctcactccacaggtcagagaagcaatgtggggattctaccagtttctgagtatgtttattccaattattcattccagggcttggaaaataatcacaagatggttttagggacctactgagtccactgtgaaatgaacttgaactaaagctccattgactatatgacctccataagcccctgctttgatttgtagaccacagtgatgttttgggtctcctggaattggtgtcagttcagagccagtgtccagtagtttctgaaagttctgactattttctttttccaaatgtacagtcaccctggcaaaaggctatagatccctttggagaaggctgaaagattaacagtatacatttttagcagtgtgccagggtcctccctttcattcaaggtgttctctgtgtgtaaactggctcaagtctgggaagttattgactggttgtgattctctgttcctatggttcaggttagaattttgctcacttgacctagaactcttctgcttacacctatcaaggaagaattcagtagacgtcccatctagttcacttctaggaacaccatgatcaactaatcaacaccacaggtctctacaggtcagactgttctgattgctgctttgactctgctattaccataccatgctcaccttgcctttggctatcaagtgccaccacctggcccttatctctctgggatccaattatacccactgcattcaggtttcccaactcagtggcagcaatttccactgcaatatctgaactacagagaagaacaatcacagtattcttcaaggattctgggactcacctcacaaatatatttctcacagttatgagaaaagtacatcctctggacctcctggggtgggttggcaggtcttaaatgataaacctaatctaatattccaatctccctaatcctttggatcacagtatatagtatatcgaggcagttctggcattttatcttcatttagactgggccaccttttggtccatttaatacaaccaaccaaataaactgtaagagctctttctaactccctaatccacatattaagtccagaatctcttctttgtggtcccatttcaataaattcagcctgatcaaacactaagttccttccaccattgtcccacacccttaaaatccctccccacaaatatttcccagatttctgtcagtataaattggaaaaatcatgtagctcttttgtagtgtaacatacctccccatgggtcacactttgtaccttacctttaagggcctgctgggacttgagtctagttataggtctagaagcaatgaaggatggtagctgtgagtcttgagaagaatcagcaatgtcttgcaaggcaacaaactcaggggaggtaataaaagtttcctcaggtaaagtagcattaatctcctcagatgggggtggcatggctgcttttactggcaaggaagactcatcagggtcaaggggttcgatacacccagctttataaggctcttcacatatgtctgcactccagttttcaagatcccattccttctcagttaatgccctcattttaacagcagacaccctaaaagggtggggattcaatttgcactgtaattcagccattttcaggatgagattttgggtttggttttcaataatctcagctttgttgttataaaatataagagtttctttcagggcagaaagagaaacttttgggttattcatgcggcacttgagctgggaaatttaatccctaagatcatcctttccttctctacattaggagtaactagccaatctcattgttctcatgagaactcaaaaatgttctaaggtatcaaatacagatgcccagaaccttgcttcttgtaaatgtctgaataggattacctaatggcaatactttgcatatctctactgtcacattacactatgaattattaatactctattcactactgaaaagtcattaatgcctttacatcttatcagattagggaagtaattcataaaactcatccttaaaattctgttcctctagaattgctctcagtaccaaattctgttactctagattctctagataaatagaatcaataggctgtatatatacagtgagaaagatttattttaaagaactgactcatgattgtggggactggcaagtcaatatctgcagggcaggccagcaggttagaccccagggaaaagttgacattgtagtcttgagtgcaaaggcagtctggaggtagaattccttcttcctctggaaattttagcgtttttttcttaatgacttcaactgactgaataaggcccactctcgttatggaggctaatcagctttactcaaagtctgctaatctaaatgttaattacatcttttaaaaaataccttcacaccaacatctagactaatatttgaccaaatagctgagtatcatagcctagcctagttgacacatgaaattaaccattaaacaagctaaaaattttagtagatgatttgaaggaggaaattttttaaaaacttatattagtttcctataaaaccaagtgaaagaaaaaaataagaataaaaatgagagagagagagagatagagaaagtacttgcaaaactacagaggtaaaagaagtaacgagaaaaggttttataagatagaaccaagaggcaaccctaaaattcatagaaactaaaaaaaaaaaaaaaaaaagacaagagtagactgaagagtagaaattacaactaaaggaagatcaattaaagggtttatttgtctaggtaagaatgatggaaatgaagcatacctggtaacattatttaattccaggaaaatagttaaagattttgaaataaaagagcatatttctcatgaagaaaaggagtcagatggccattacagttctcatctaaaacactggaaggaagaggacagtgaagtaacactcagggaaaaaaaatgagaaaaaaaagaactaaaacccaagattcctaaaaccaacaaggatattcgtttatcaggataaaaaaaaaaaaaaaaaaaagtagagcttgagactgcatcaactacttatacccatctccaatcaaacaattaattcatcagaacagtgatttcaaattaagggaaaagggaaagaaaatgaagtaatagcaacaaatactacaaaacatagtttcatatctataagaagaatgacgagagccaggcattccagctacttgggaggctgagacagaaggatcacttgaagccaagagtttgagaccagcctaagcaaaagcgtgagtccctgtttctaaaaaaaaaataaatgaataaaaaattagctgggtatggtggcacatgcccatccccatagtcccaactacttgggaagctgaggtgggaggattgcttgagctcaggagtttgaggtttcggtgagctatgattatgctactgcactccaagtagactctgattcttaaagaaacaaaacagctctgtgcggtggctcatgcttataatcccagcactttgggaggccgaggtgggtggatcacctgaggtcaggagttcgagaccagcctgaccaacatggagaaaacccatctctactaaaaatacaaaattagccaggtgtggtggcacatgcctgtaatcccagctactcaggaggctgaggcaggaaaatcgcttgaacccaggaggcaaagggtgcggtgagctgagactatgccactgcactccagcctgggcgacagcgagactccatctcaaaaggagaaaaaaaaaaaggtttcttgaaataggaaagaaaacaatgtacaataaatacagtggtggttaggcctgggtttgaatcccagatctctctcctatttgcagtgtgaaagtgagaaaattacttatctcttttagcctttctgtaaacaaggacactaacatactgacaccttagaggtaggttgttgtggggattaaacattactacctataacagacttaaattagtaataagcaatagtaataaacatattagtgttactactactattattattagtgggtggtagtagcagaaacaaacatagagcaacctcaagaagtacagaaagaagcttgttaaatctctgccttgaagagcttgttttcccatctatctatattataatgctgaagtgtatgaaaattttttaaaagtgtaatataccttttgcactcacaaaccacctttttaacagtttatggaggtaaaactgtcatacatgtgcacccatgagaccaccaccacaataaagataattaaacatctccatcagtgcaaaactatcctcatgcctctttataatctatccttcttgctctcatcttgccccaaggcaaccactgagacgttctgtcaatacaaattagtttaaattttctaacattttatatatgtggaagcatacagtatattagttttctaggtttgaaatttattttcacattctggaggctggaagtccagtattgttatggtttggatgtttgtcctctccaaaccttatgttgaaaactgatccccaacattggaagtggggcctaatgggaggttttgagtcatggagacaaatcactcatgaatagattgatgcccttcctcagggttgagtgagttctcactctattcactgccgcaaaaaccgattattaaaaaggaccaggcacctctctctctccctcttgtgtcctctttcaccatgtaatctctgcacatgctgattccacttcaccttctaccatgagtggaagtagcctgaagccctcactagaggcccaatcttgaaccttccagccagcagaactgggaattaaataaacctcttttatttataaattaaccagccccaagtattcctttatagcaatacaaaatggaataagacagaaaattggtactgagaattggggtgttgctataaagatacctgaaaatgtggaagcagttttggaactgggcgatgagcggaggttggaagtgtgtggaaggctcagaaaaagacaataatatgagagagtgtctggaaaaagtgcccaaaggcacttcagaaatatttggggccaccccttccctaataggcccaaggccttctggggacagacctggagcaccactgcccttggccacctcaggatgctgctccccacatcctggctgctctggctccagcagtgggtcaaatggccccaggtagggtttgggccactgctcctgaggggctaagtggtaagccttggtggcattcatgtggtgttaagtctgcaggcatccagaatgcaagggacatggaggcttggcagctttaacctaaatttcagagaatatattaaaaagcctgggaaagcaggcagatgcctattgcaggagtggagccaccaaagagagcccctaccaaggcaatctttagtggaaatgttgggttggagtttccttagagtccccaccagggcaactcttagtggacccacaaaggtgctggaaccccacaatagtagagctatccacagcattccacctcagcctgaaaaagctgcagcattattacaacccatggaagcagccagtggtctacgcccagcaaagctatgggggaagggctactcaaggccttgggagcccaccccacacaccactgtgaccaatatgtaggagatagagtcaaaggagattattttggagctttaagatttaaagtgtgccctgctgtgttttggacttgcatggggcctattatccctttcttttgaccaatttttcctttttggaatggaaacatttacccagtgcctgtaccaccattgtaccttggaggtaaataatctcttttttgattttacaggcttacaactggaaagaacttactttgagtctcagatgtgactttgaacttttaagttggtgctgaaacaagttgacttttagggactattgggaaggaataattgtattttgcaatgtggtaagaacataagttttaaagggccgggggcaaaatgctatgatttagatgtttggcccttctaaacctcatgttgaaacttgattcccaatgttggaagtggagcctaatgggaggtgtttgagtcacaagggcacatccctcattaatagattaatggcaggagtgagctctcactctattcgttctgcaagagcctggtacctccccatttctctcctgcttcctctctcaccatgtgatctctgcatatgctggttttacttcactttccaccatgagtggaagcagcccatagccctcaccagatgcccactcttgaaccttccggtctgcagaactatgagctaactaaatccctttccttcataaattattcctctatagcaacacaaagaaactaagacaaagatcaaggtggcagcaggcttggtttttcctgaggcctctctccttggcctgccaatggctgccttcttgctgtgtcttcacatggacctttctctgtgcctttggatccctgatgtctcttgtgtgtcccaatttcttctttatataaggacatctgatggattggattgggcacactctaagaacctcattttatattaattactactttaaaggccctatctccaaatcaggtcacattctgaggtacaaagggttggaacttcaacatacaaattttgggagaatttaatttggctcataacacacagtatatactcttttgactggcttatttcactgagtaaaattattttaagattcattcatgttgttcaatgcattgttagtcattttttattgcctagttgcattctattatgtagacataccacaatttgtttattcactcttccgttgatgggcatttgcactgtttccagtttttggctattataagtaaatctgatatgaacattagtatataagtctttatgcagacatatgctttaatttctcttaggtaaaacatatgaatagaactgctaaatcatatggtaggtacatgtttaactttattagaaacaaattccatttcattgcagtgagtgtaaaatggtatctcattatggttttaatttgcattttcctaatgatttacaatggtgaatatcatttcatgcatttatttgccatccttatatcttccctgagaagtgtctgctcaaattttttgctcatttagtgttgggttatttgtcctcttcttgatttgtagtaattatagattataaatataagtttttgtgagataaatgttttgcctgtatttttcttctagcctgttgctttcctttttggttttataataatatgctttgaagagcagggttttttttttaatttgatgaagtccaatttattttttttcttttacaatttgagggttttgtgtcctatttaggaaaaatttgccaaagccaagggcagtaacgttttctcctagggtttctttcagaagttttatgtttttaactctaatgataggtctataatctattttgagttaatttttatataagttgtgaggtaagaatcaaagttcatttttggtacatgaatatgcaactgtccagatgatttgttgaaagattatcccttccttattgtcttgcattaaatttagatattatcatcttctctgttcttctcacatgatcatacagaacactcaatgagaaatatataagcatgctctgaaaagtgagaagctaacagaaacctaagtcactaccttgattagttctgaataggtccctgatagataagtaacagaaaaaatattaggccaggagttggggaacctgtgtgactcgctcttttattagccttcaaactgctttgtaagttgtgaaatggtaaagaaatggaagatattgtctttatacctaaaaattcctatactacataataaaggccattcttgcttggcatgatggtacagggccataaatatgaccatgcaagttgaaaccatgcgaaaggacctttgttgttgttgttgttgttgagacggagtcttgctctgtcgcccggggctggagtgcagtggcgctatctcagctcggctcactgcaagctctgcctcctgagttcacgccattctcctgcctcagcctcctgagtagctgggactacaggggcctccaccacgcccagctaatttttttgtatttttagtagagacagggtttcaccgtgttagccaggatggtcttgatctcctgacctcctgatctgcccgcctcggcctcccaaagtgctgggattacaggcatgagccaccgcgcccagtcacaaaaggatcttagtaatcaataggaaatattattcttgtttcatggctcttaacattttttgtgaaatcattaaaaactcacttattgctggctatacatatatagagaagcaaaaaatagcaagactaatatttagaacattgtaatttaaaacattagaaatattgggaattaaagcatttaatttgttaaaaaaaaaaaaaaaaacttacccagagtagtttgaacagtgtttgcctcttctttttgttgtataacttacaatacagagtgagcattttttctatgtctaggctaacttccaagtctggatcagtttccaccttttatccttggcacttatattgctgtgaaatagctccaaagtttctttaatgtcaagttttctaccatcattgcttcccctaggttgcctttatccttttcctcacaagcactttggtcattcatgtcggtaagttccccttccacaggtgccttaggctgcagctctagggtcttttgagcagtagcagtgtcagcatgtccctggtcagctagttcttctataactccattcaaatttcatttccaacattatcactttttatccctttattgcagtttcatctctctcagccaaatctctctcttgattatacattttggtaaaaggtcataggggtttaccattgagagacaaggagacaatacaatcacatgctttgctgtgtgtgaactgaataagaggctcacagttacctatcactgacatattttgaaagaagtaacatttattagtcactggtcatgatgcacatctgttatttacatagggacttgtggactaaagtgccagcaaagatgcttactactttaggcaattacttgcagtgaatatattgtggtaactaaaatgtgaattgtactgtgggactggtgttatttagctaaacacagtaactgatatttgagcatattggggccatgcaaagtgaaggttccctatatttgcagtgttcaaaggtgtgtgaattcatctatttagtgttctcagcatttgaagacgacaaataaattacttctttagctttcttaatatgagtcttcaggaaccttttctataaagtcaagaaatgtgtgattaaaaaaaccacagagctttctatgatggccacttaagttggctgagtttcagattagattacactgcgttatgaggtagatataccaatgggcctttaaaaagaatatggttgaattatagtttcttttcttttatgaaaagccaaaagttttacataacttcccttactttaatgatttaacattatttttattatctttgaatttcttagttgtaactcttttgatatccagaataaaaacttcaagtcagatcaaatattatgtgtaccttctattgtaaaatgagcttcttacaatcccgagaggctaatttttaaggcatgtttgcttttagtctccttgagggcaaactgcacatgcagaaatagaaattataaaatttggacctttgacattttggagaagcaacaaattattagtattatttattaaaatgtctaatcatggttcattattctgatttcagaagtattcatcaatgcacttctccacactctccccacagaagataacagaatagcttattttaaccatgttggatatgtacttgttttttatcatcataaagttagtttcaattctaataaaccaactaaacatgaaggtatttatctagtgaccgcagtcactgtgttccactctggtttttataataactatctcaagtctagtaggagaaacaaaagtgaaaataattaaaatatggtttggtagaaggggagagtggttacaagatgctgtgagactactggaaaaacaccaaacctagctttgaggaaaataagaaaagcctattggagctggttaagaaagatagcaggaactgcctcagcaaagaagggatgagtagttctttcaagaactgcaggttaagaggcataaaaaccaacaaataagaaaagaattatgaattctagataccaaaagaagttttgtgggagagctaaggctagagaggcaaacaggtgaaattcttaggccatgttaaacaactgtaccatgatagtaacaaagagccaagaaagagctttaaaagaagagctacatgttctgacttgcattttaagaaaatctcagtagcttttgtgaatgatcagaaagggaggcagtaaagaagaacgtaaccagctgagaggtaaaatgggctcagtctaagtcagcagcagtgggaactgagagatgggggaggactccagaggtattatggaggtagaatcaactgactccctgttttctggtttgaacttggtgattacataagatatagaatataagaagagggtcaagttggaggaagtaaaatagtaaatttagttttgaaaaactttgactttgaaaggaatgtgagttatggaatgagatatcctgcctaagattaaaattgcattgctgtgttttgattctgctctttgaatggcctgagatggataactcctaagagtaactgagtgaggaggacagaaggtgccactaccctcccatccaacacagggaagcaatgttaaggctctgtggagacaatcaaaaggcagcctcctgttggagagcagattaacagctttattgtccaggatgaaggatgcaaatagctcttttttcgcgtgtctaaacaaaatagccagagaaggtggttaaggcttcgggtaccaaaagtggtgtatgactcagactattggattttatgttttggaaggctcatgctctgagaagcagcaatatatgagaacaaggctgaaggactgctgtaaaggaccctgtaacagtggctgaaggatgtaccagaaaacagaggacctgactctctcatatgtagcacatatcttagaatatgcccagatcacccagtgctatgtaccagaaccctttatcatggtcacaggccaaaatgtctcatacaaaaagccatacagtgccctttgcactttttctaaatgtaaacaggaaaataatcaaaactatttttagcttacatggaagaatatctcggtatctatttttttctctgttgcttggttgattcccagagttgaactcaccaggcagattcttaagttctaaagcctttaaaaggttaaaaatgaataaataaataaataataaattgtgtatttactataaccaataaaaaagaaaaaaatatgcctttgtttagtgctcatgatccttaaatccctatatgacatgacctgctatttaatgtgttgtatgataagtgaagctagatcctcatttaaaaagtgctatataaaatatctcaagtttcacatgccaatcaatgagttggttaataagaaaatgttaaactttctggagatactttccacttgaacttcattttgttcttctttcataaaaaaggaaatacaagctattcatttctcagaacctacccacagatctatcattttataaataaaaataacaacataacaacaacaaaaacatataaacaaaaaatatatacaaacagtctcacaatttacccttcccctttgaagaaattatagttaggaccctaagaatccttcctttcaaaaaatttctttaccaagtgtgaattcaacaaacacttattacgcatttagtaggtatctggccttgtttcagacactggaatacagggatgaattggataatggcctcatccttaaggagtgaacagagtagttagaggacatgtaatcaaataccatgtgaccaatgtacggagacagtagtataaatgacagcactagattgcacctaaaagtcaagaagaaaagctcctcaaagggaaatagcccttgaactgggccttagtgagtcactggaagttagcatatgaaaaacagtgtgtacttagaaggaaagaggagagaaggtgaaggggtggaaataatggaggcatacatgtccctttgggaaactgtgactaatacggtaataagagcacaaagcacatgatctagtccaacaacagactaaaactataaaatatcttgtttcatatataaatgaaattaggaggtagctagtcatactttattagaatatttgtggagaaagcctgaaaatctatacattttcaaagctcttgggtaactcttgtgtagccaacctagcaaccgctgccatggggaacaaggagcctgtgaaggttttaagtagtacaataaaatgatcaagtctttctgaaaatcaattttaaaattaatctggaaaaaattctgtaggaagaatgagaaaaaattcatttatgaatgaataatgatggcagatgagtctcattagatgttaaaagataatatgaagctatgctaattaacagaacaataccaataaaggaataagaaaatcagtagaaaaagtccaagaataaattaaaatatatgtaaggctctagtatatgataaaagtggcattttacctcactcaagagaaattccaggagagtcttgggacaactggatagttatataatgctgagtccctatcaaacatcttataccaaattaaattctagctgcatcaaagatttaaatgcttaaaaatcataaaggtactagaaaaaaacatgaagtaattattacaatcctagagtaaaagaagcattcctaaagagcacagaaagccccaaacccagaagccccaaaagcaaagattgccatatttgaccactaaaaatcagctatttcttcatggtaaataggcatgtgtgtgcacatgcatgtgcacctgtgtgtaacacaaacaacagcagaaaaaatactacgtgtaagacacacaaaggcataattttttccttaaagagttagtaatcggccaggcgcggtggctcacgcctgtaatcccagcactttgggaggccaaggtgggctgatcaccttaggtcaggagtttgagagcagccctggccaacatggtgaaaccctgtctctactaaaaatacaaaaattagccaggtatggtggcaggcacctgtaatcccagctactcgggaggctgaggcaggagaatcgcttgaacctgggaggcggaggttgcagtgagccgagatcgcaccactgcactccagcctgggggacaagagcaagactcatctcaaaaaaaaaaagagtaaccaataagaaaaaaaaaaaaaggaaaatggggcaaagaattgaaactagcagttcactgaaaatataaaaggcttaaaaacatatggaaagatattcttttgttctcaaataaataccaattaagtaatcaataagaaataatttgtcatttaagagatgagaaaagatccaaaaaattgatagcccaaaatattaatattgtctttctaggaatttgttcaaaaaatatttaaatatatgcatacagtatatgaagagagatgaccgctgttcataatagcaaagactagaacaacctaaatgtccaaatgttccatggtagttaattatatggataagtaccctaatttcagaaattaaatattaaataaattaaggtacttatccatataattaccatgcaacacttaaaaaaatgagatactgctatacatgctgataatatacttggaaattgtatctaggaggaaaacaaatttaaggatgtaaagtgcattccaacaaatttttttaaaagtttgcatgacaaaatgacaaaatgaatagtgtaaaggggccctagaaagtcttgagagaaagagagagactttctattttatatccttttatgctatttggctttttttttaaccacgtacatctattactttaaaatatatataacatttaaaagtaaaaacaatgtactaaaaccaaataaagaaagaaaagaaaagaaaccctctggcaatgatataaaaaaagaaatcacatatagactttcgttaagaaaatatttaccataaattcctgcatgatatcatacgctgctgttttttcctcaaggattttcaaacaatccttgatggctgtctgctcatgaaaattgaatattaatggccgaatctgagccaactgatctagttctccttcagaaacaattttgcgcgtatctaaggaagagaaaaattcacatatgtaagttactggtatatatgtgaagggagattttatttttgtttctgtttctcttaaagacacagccatttaagggtaaacagaagtttatttttccacgggtgaagagtctactactttgaaagaggcttcctttggaaaaatcatggctatttacaccttgaaattatacaaaatccactgcccttggagaaaactgttcagtgccataaacataacgaatgctgtggattgagaagtgttcagttttataatgtgaattgggtatatggattgaaaattatgccaaggcaagaacgtacaaggcttggattaggaaagagaacttttgccctccctgggaccaagtgtttggaagttcctagagtctgagatgtggtgatgtggagagttcacgtcctgtttcattactctgaaacagattgaacatgaacgcacacacgtgcacacacaccaaggatggagaggatctatgcaatataattaataagatggaataatggatacatatggacacttgcaaccaataattggggagaacattctattaatatttaatagcacacatacaatctttttatttttaattatgatcttttaggtaatgttgacagtcaaggttccaaacatctgaaattttatacattatgtccactggccaaaatgcaataaatctagaagtcaacagtaaaagagtattttaaaagcttcaaaattttgaggtaagatgttcaagtaaaacaagttctcataatctctttgcaaagccaaataatgtgaacaataatcaagttaataccagcaaaaagatatatacaaaacaatatagcaaaagaaagaggtggaaatttctaagaatctgcacattcctgggaagcacatcttatcttggtactccactatatccagaggctctttgtagggttggaagtgagggctcttggttgggatagacaggcacagaaatcctaaaatttctcacaaatatccctaaccttagtatgagaggaggtctaagcaggctggaaggggagataaaattcccacaagcgtagaagccattttgatcatctttgatgcccaacagaaaaacccttagatcttcccattgtgttccacctttgctagtacaaaagctgggagaatgaagagagaaaaaaatgaaaatgtagaatgactgtaacaaacactggtgttgactccccaacaccgattctacccctctggttagttaaagccatttgtgatcattccatagtaagatccttccagtgaataattcagaaataggtaggagatttgcgccaaccatagaaataggctggtcttgtaaaaaagagaagcaaacctctcttctaccctcatccctctgtacacacataaacaaagaagtataaggacctaattatcatagtctgccctcttatggccataaaaggaaagagtatagcaaatgtgaaaaacataaagaaactatgttcttgatgacattagcaactgatcatattgaacctggaatccttcctatctctgggcttccattatggtagaaaatatatatatatctttatcattaacatcattctgaatttggtctctttttcttgtagcctggtccaagaattccaatcaaagtataaaggtgaggtttcagctgtagatcctgggaatcatttcagccagtttacagaaagggatttgatctagctatttggtgttgtatcaccattgtgtgggcttgaagaacagatgcttctctcattatgatccaagaacaacactgcataatggtctgccaagaaaagttctgtctttgccacaattaggaaactgaggaagttggagaccattttttctagccactggctcctagatgacaccacttcagcaacaatggagaaataagaaagtcactaccacaactgttggctctagtaacacatcaccttacctataatgaggaccaggaacgccaagcctgctatgatgcatagcaataaaatggatgcctctctacacatttacatcttggctaagtgcatatgatcggcaaagcccaaataagctaccaggaagtcttgaaaatgtaatttttcatttttctgcctgggccatacaggaaggtacactaggagaagggtgtgactgatattgagtaagggcatctgtgatatctgcttaacatttcagccacaccatgccctttgagtatcctgctccttggcccctatcccttcagcacacttatcattgtcctcgggcaaaataaacaatgcagccctccaaaatacagtttacaagggaagatgatgagatccaaataaaaatggaaatcaggaagaattcattcctgctcaatcaacaaaaccgaagagacagaaaaagctatacgtgttcataacaaaatggaataaaatgtgaaacacagaaaaaataataatataatatagcatgcagaataatttttaaaatctattctaaaatggaagataagcttaaaaaggaaaatgaactgtgtatgcaacatctgtcgaaagaaaaagaaaaattattttaaataacagttcacaaggagataagaaaacaatagaatgaggtttaaaaaaattagtttataaacctaagaaaataaaggtaaaactcaaaagtacataattacagcaataatttataattaaatcgaattctgcaagaaacaaagcagacagttgaaaatcaacttattgccataggacaaaggcatgtatacatacagtaatgaagacaagaaaggtttaaaaacaaacagtgaaaagataatgcatgtgaggacctcatcagaggctcaggagaaaagctgcagacagggtgaggaacttgagaaatcctcctttgtggggcaagcttgggaaggggaaaaacagcatccacaggaatggcacaaagcatgcccaaaatgcttttccctatttccctaatggaccaaaagcataagaacctgagaaaacgcatgaaactctgtcatcctcaaggcacaaatgaagactcattaacattgggggtagggaagagagaagagcatcctggacccaggccataagatattccctacacctgcagaatggacaaaataacaaaggaggtaccgcctgaggccttcctaagactgagactgaacaaggacagcagagaatgtcaccccaaccaggttggcaagcaaggtaatcataagtaagagctctctactgctgggaattagagaagatcatggagaagaccttctctgaggtgcatgtacaatgggaagagctaaagcagagggtggagtaaacactgaggcaaatcctctacatgtaaggtaacactggaggaatttgaagctggtggtgcactaagggtaaccatagcaacatcaaacccaagccctgctgcattactgagtaaattgatgcaactcctcacactgaaggcctaccaacaaaagagtcatgtccatccctatttacctcagcgtctagaacttagctaagaaatactacaatagctcccccttagctgcaggggatatgttccaagacccccagtggatgcatgaaactctggatagtattgaacctgatcgtcatcaactgaaacatatttttgttcatgtcttccacccataaatttaatgccttttccatcttaagtaagcatgtatcatgcactgtggccataactttggcactctgatgtgcaacagcaaaacttggatagaagattcattcttaccataggtctacgcaactttagcatatgatttttttctttccttattaagtcaagaactttcaccttttcatgtaaagaaagcactttacagcttccctttggcatattcaaattgccagcatcactactctttggggccattactaagtaaaataagggttacttgaacacaagcactgtgaggccaaaacagtagatctgataaccaagatgactactagttgactaagagacaggtagcacatagggcatgaatatgctggacaaaggaatgattcactcccaggcaggacagagcaggacagtgtgaggtttcatcacactactcagaacagtgtgcaatttaaaacttattgtttatatctggaattgtccacttaacatttttagtctgtggttgactgcaggtaactgaaactatgaagagtgaaaccatggataagacatttttacttctatctctagactatacaatattcagttttcaaccaaaaaattatagagtacacacagaagtaagaaaaagagaaaaaagttgccaagagacaaagcaatcaacagaaccagacagagatataacatatgttaaaactgtcaagtgatgaatttaaaatagtgataatcaatgtgtgaaaaggcagtgggaaaagtagacaatatacatgaacaaatggagaatttcaatggagagatggaagccataaaaataataaagtggaaatgcttaaagtaaaaaaaatattgtaagaaattaagcatgttattgataagctcatcagtagatttcacagaggcaagaaaagaattcatgaattacaaaatagatcaagaggaattatctgaattagaacacagagaaaaaaggtagatgaggggcagaggcagagaagaagagaccatccaagaactacaaaccaatatcaaacagactaatatattatacctgtaaatggaatcccaaaatagaagagaaggagaattgggcagaagaaatatttgaaaagataataactgagaattttttccaaaatgaatgaaagacaccaagcctcagatccaaaagctcatcaaaaacaatataagccagaagacaattgagtgacaactttaatgtaatcaaagaaaaaatcaaaataaagaaattaagatttcagtaaatacatgactaattataaaagctagtattcttgtaacaataatgtgtaacttcactttttcttttctacatgatttaagagatgactttttcctaaatttattagcctaaaaataaaaaaattatcataactttagattgtaaatcaacattttgttttctacatgagaaactaaagcattaaaaacattattttatgttttggaacacataatatataaaaatgtaattttgtgacaacaaatgaaagagatggggtcaaaactgtcaaaggtccacagtttttttttttttgtattttactgaattaggctggcataaattcaaattagagtgataagtttaggatgttaaatataatgcccatggtaaccacaaagaaaatagctaaaaacaatacataaaggaaattttttaagaatttaaatatttcattacaaaaggcaactaaatacaaaaggagacagtaaggcaaaaaaaaatgaggaacaaaaaagctacaagaaatatttttttaaaatagcaaaatgacagaagtctctccttatcagtaattactttagatataaatgaattaaactcaccaattgaaagaaagattggcagaatggattaaaaaataaaaacatgatccaactatacactgtctacaaaggactcactttagatccaaagacacgaataggttaaaagtaaaagaaatattccatgcaaacaggaaccaaaacagagcatgaatagctatattaatatcagataaaatcgattttaattttaaaaagttaaaaatgacaaagaaggacattatatatcataaaaggttcaatacagcaagaacatataacagttataaacatttacacgcctagtaacaatcaaaatacacaaagcaaaaattgacagaaatgaagagagaaacagttttacaataataattgaagatttcaatatcccattttcattagtggatagaacaattagacagaagtaagaaaagggaggacttgaacaatataataaacaaagtatatctaacagatacatacagaatcctctgtgcaacaacagaccacatatttaagaacacatggaatattttgcatgtgttaggctataaactaagtatcagtcaattttaaaacactggtatcacaaagagtatcttctcaaaatacaagagataaagttagaaatcaaatataagaaaaactgataaacttacagatttgtgaaaattgaacgacataattttaaaacaccaatggatcaaagaaggaattacaagggaaattagaaacatttagaaatgagtgaaaacataacacaacatatcaaaactatgggacacagcaaaagcagggttaagggggaaatttatagctataaatgcttacatgaaagaaacaaggcctcgaataaacaaactagctttacaacgtaaggaattacaaaaagaagaacaaactaaacctaaagctaacaaaaggaagaaaatagtaaagattagagcagagatcaaaatataaaatataaaaaagagaaaaatcaatgaaaccaaaagcaagttcttcaaaaatatcaacaaaatgatgtgatgaacctttaattagataaactaagataaaaagagaaaagactcaaactactaaaatcagaaataaaaatgaggacattactaccaattctaaagaaataaaaaagattataagggagtactatgagcaattgtatgcagaaaaactggataacctcaatgaaatagacaaatttatagaaacacaaaacctaccaaaaccaaaccacaaagaaacagaaaatctgaacagacctatgactagtaaggtgattgaataagttatcaaaactatcccaaaaaagtaagccctggatccaatgccttcactgttaaattctatcaaacatttaaaggagaactaacaccaatacttgtcaaactgtttaaaaaaattaaagagtagggaacactccctaacttaatctatgaggccagcattatcccaatatcaaagccagacaattatcctacatgaaaagaaaactaaaggccaatatccatcttaaacattgatgtaaaaatcctcaacaaaatagtagcaaagcaaatatttagcggcatattaaaaagatcatacaccatgactatgtgggatttattactggaatgcaaagatgacttaacatacaaaaatcaaggtaatacaatacgctaacagaaaaaaaggcatgcttatctcagttgatgcagagagagtatttgacaaaattcaacatcctttcaagaatatattctttttgagacagagtttcactgttgcgcaggctgaagtacagtggtgtgatcccagatcactgcaacctctgcctcctgggttcaagtgactctcctgctctgcctcagcctcagcctcccaagtagctgggattacaggcaactgctaccacgtctggctaatttttgtactttttctttagtagagacatgttgcctagggtggtcgtgaactccccaacctcaggtgatctgcctgccttggcctcccaaagtgctgagattactggcatgagccaccatgcctggcctatttgtttgtagaaaaaaaattcaacaaactaggaacataagaaaaatacataaacataataaaagttatgtatggaaaacccacagcaaatatactcaatgttgaaagagtaaaagcttttcccctaagatcagaaacaaggcacggatgccacttttgccacttctatttgacataatattggaagtcctagtcagagaaattaggaaaaaaaagaaataaaagccatccaaactggggaaagcaaaaagtaaacatctctgtttgccaatgatatgatattatatgtagaaaatcctaaagattactggattttacacacacatattcacacacacacagagttaaaaaaaataaattcagtaaagtagcaggatacaaagtcacacacaaaaatcagttgcatttatatacactcagatgaacaatctgaaaatgaaattaagaaaacaatttcatttacaataatatataaaaagaaataaaatactttgaaattaacttagccaagaaggggaagggaaagatttgtacaaagagacctataaaacattgctgaaaaaagaattaaacaaatatatctcatgttcatggtttggaagatttaatatcattaagatatcagtactacccaaaacgatctacagattcaatgtaatccttatcaaaatcccaatgactccttctgcagaaatagaaaaactcatcctaaaattcatatggaatttcaaaggaccccaaatagctaaaacaatcctgaaaaatatggggaaaaaagactcacacttcttgatttcaaaacttactacaatactacagtaatcaaaacagtctggtacaggcatagacagacatataggccaaaggaatagaagaaagagtccagaaataaaacccaaattattttcaaaaaagttgtcaaggccatttaatgggaaaaacacagtctttacaacaaatggtgctgggaagctggatatccacatgcaaaataataaaattggatctttaccgaacgccatatacaaaaattaacttgaaatggatccattacctaaatgtaaaagctaaaactataaaactcttacaagaaagcatggcaataacttcaagacattggatctggcaatgattccaaaggtacaaacaaattttaaaaaatataattaataatactgaaatatacacttaaaatggataagatagtaaatgttatgttatgtaagatttacaacaataaaaataatttggagaaaatacctctaagtaacccacagatcaaaggggaagtcataagagaaatagggagacattttgttaaaaatgtgtagattgtattttttagaaaagttttacatgaaaaaaaaatgagcacttagaattcccatatatcccctgccaaagtttcacttattattaatgttttacatttggatggtacattcattagtattgaaccaatattgatacatttttgttaactaaagtccatcctgtattttggttttcttagatttccttaatatctttttactgtttcaggagcccatctaggataaaacattacatttagttgtcaagtctccttgggcaacttttggctatgatggcttctcagattttccttgtttttgatgaccttgataggtttgaagagtactggccaggtgtattcttcaatgccttactattgaaatttgtctaattttttctcatgattaagactggggttatgggttttcaggaataagatcacagaggtagagtgccatatttatccatagtatcaagggtatattatatcaacatgatgtatgacagttgatggtgaccttgatcacatggctgcagtagtgtttattaggtttctctactatgcagttattctttgtactcctctggccatactgtactctttgaaagaaagtcaatatgtgcaacccacacttaagaggtgggaaattatgatccacttcctttaaaattgaatattaacgtaatttatcaggaattcttctgcatgggagatttgtctcttcttccccatttattaacatatttaatcatttatttatatcagtatgaactcatggatgatgattttatacttcatactataatccactgctacattagattgttgttcaaattgttccaccttttgctacttagaatgagaaaacattataaattgaatgaaaataaaaacacctcaaaatgtgtgggatgcaactaaagcagtacttacaggaagatttgttgtattaaatacttgtactactgttgtccctctgtatttgcaaggaattggttccaggacctcccacagataccaaaatcctcagatgctcaagtcctttacacaaaatagcatagtatttgcatataatctaagcacaccctctctctcaaatactttaaatcatatctagattacttataatacctaatacaacataaatgccatgtaaatagttgttatatttttaaaatttgtaattttttgttgttgtattgttatctttgttcctaaaatatctttgatccatagttggttgaatttgtagatgcagaatctacagataaggagggccagttgtatttatgaaaaagaaatatatcaataatctaagtttccaccttaataaattaagaaaagataaaataaaatccaaagcaagaaggaaaaaggaaataataaagagcagaaatcaatgaaattgaaatcaatgagaaagtaagggaaactaaaagctagttcttggaaaatatcaatagaattgatacagtctctagccaaactgatcaagaaacacagaacaaagacacattttatgaaattgaaaaaaaagagaggtgatcagttaagataagacatcaaaaagttaatgagggaatattacaaacaactctagtcccataagttagacaatttacatgaatgggacaaattcactgaaaaatacaaactgccaaagctcattaaaaaaaagagagacacctaaatagtcctatatcaattaaataaattgaatattgttatgggctgaattgtggcccatatgtggccgtatttggagatagggtttataaagaggtgattaagttaaaatgaagtcattagaatagcccttaacgtaatataactgatatccttataagaagagattaagacacagatatacacagtgggaagaccatgtgaagacacagaggaaagacggccatctgcaagtcaaggagagaggcctcagaagaaatcaactttgctgacatcttgatgtttgactgctagcccacagaactgtaagatccattcttggatattttgttataaaagcacccccccccaaaaaaaaaaaaaaactaaaaactaacacaaatatgtatttagaaacctcacaaattctgggtccagttggcctcactggtgaattttagcaaacatttaaggaagcaatactaccaattttatacaaacttttccagaatattgaagaggagaaaacacttcccaaataattttataagggaagcattgctctgatactaaaaccggaaaaagatatcacaaaaaaagaaaattacagatgaatatctgtcatgaacataaacacaaaaaaagtcttcaggaaaatactagcaaatcaaatcgtaaaacataaaaacaatattacaccatcacaaagttgggcttatcccaggaatgcaaagcaggtgagatatttggaaatcaaccaaagtaactcacggtatatcaacaggcaaaaaaaagaaaaactatatgatgatctgaatagacgcagaaaaagcatttaacaaaagtaagagtccattcataataactccgggaaactaggataataggaaggctcccttaatctgataaatggcattcacaaaaatactacagcgaacattatactttatgatgaaaaacagaatgctttctccctaaaatggagaatctggaaaggatgtccactccctttcctcttattcaacattgaaccaaaagtcctagcgaatgcaataagttagtaagtcaaaaaaaaagaaagaaagaaagaaagaaagaaagaaagaaagaaagaaagaaagaaagaaagaaagaaaagaaatgaaaggcatatacattggaaaagtagaaaaataaaactgtgtttattcaccaacatgagtatctacttaaaaaaattccaaaaaatatatttaaaaggccctagaattaatgagcatttaggaaggttgaaggacacattggtaatatacaaaaatcaatcatatttctatctactatcaatgaacaatagaagttaaaatatttttcataagtctcatttacaatagcaccaaaacatgtgaaatattagatataaatctaacaaaacatatatacaatctatatgttaagactgcaaaacaaacaaacactgatgaaagaaatcaatgcagacctaaacagagtgaggaatgcttccgtcaggagaaacaacaacaaatccgttaaagtggaatttgagaacgccaccaggacattttgggttcctcatatgctactgaatcatcagggaaagggggattactacactgcctagtgtgctggattccaagtattaaggggaaactgggctgctgctttccaatggagtaacgaggaatacgtctgcaatgcaggtgatcctctagggtgtgtcaaggtgattaagtaaacagaaaactagaaccacccaatttaggcagaactactaatgacttagatcttgaggaatgaatgtgtgggtcaccctatcagacaaggaaccacaaccaaatgggatgtttgctgagctgaaagagaataccagacaggtgtaagacggcagtgatcaaaatcagatacaaccatgtgaccagctgcataaacagggataaaatattgtgaatttttctttcttttttgatatgcatattttatacatatatatatatcatatttttgttttcttttaaaaatattaaagggaatgtgaatcagttggaaaagaaagaatatcactcaagacaaaaaagagacacttttggagaaggggagagaatgttttcagttgtacacagattagttttatcactgtagatgcaagcataaggttgtccttatttggatattaagtaacatttaaaagggtgtatataggtgccaggctgatacagggtgaactgtgatagctttataatatgttgacatggctaggctggaccacttttcccagaattctgttctctgaatgtttccagctaaaacagggcacaagcgaggttctcatgtcagatctggaaggtgaacatggggcagcagctattctgtgctcagatgcactatggatgatctcctgactcccctcattctatatgtggaaggaagaacttaaaatcacaacagtgccaatcctacctgaatgaatataactggcatgtcattctatctaaatttcaaacaagtttacacaggaatgaacaaaataatttaaaatcaccgatgcagcaaaaacttgcccaaatagctacaaaaatgtattttttaaaaaattagagggaggattttcctttccagatatatttagaataagtagaatcaaaacagaataatataatatgtccacaggaacaaacaagtcagttagtgaaaaaaaatttagagaatacaaaaggatcaaacatttttggaaacttaatatgtgataaaagtatatataaattcatttgggaaatgtggtttacttagtgaatagtgctggtataactgtccagtcatatgaaagaaaatatagttttctatacccctataatatttagcaataaactgcagatagattcgtgatctaagcaaaataagtgaataaaaattctgaagaaaatttaggagaatatttgcatgtttttcctgtaaagaagacctttttaaacattttagaaattaagaatgttcatgaaagtctcccttcttaaggtatagaattgagggttacaatttatagcacatttgtcagacagacaacatgttaagatttccaacatgtgaagagttcctacaaattaataagaaaaacaatgaacaaagtttataaatatgcaaatccaagaagaagttaataaacatatattaagatacttgatcctagctgggcacagtggctcacgcctgtaatcccagcactttgggagaccaagacgggtggatcacaatgtcaggagttcgagaccagcctgaccaacatggggaaacctggactctattaaaaatacaaaaattagccgggcatggtggctaagcttttggaaaggaatctggtattgcccattaaaatataaaacgaacataaactttgacttaactatcttactttagggaatctaaccaaaatcaaagtaccagtacttaggaaatacatgtaaatatatatactgcagaaaaagtcaactggagaatgggtgaatatattatggtatttccatacaatgaaatattagacaactattaatcctatgtcagaatatgtcttaacctatataataatatagtttaaattttaaaaactatggttgcagggtaattgtagagttgcagagcacacatcaatttttatttaaactttaaacagaaaatctgtttttatatctttgtgtattcttagataaactattatattggttgcctctgaaccaggattcaggatgatgggaggaaattattaactttttctctatatcattctatattgattttcactaaaatattagcatacattaactttataatttaattttttaaaattttggcttttaaaatattttattaaatgttaaataggtacaaaataataattaagtaaaatatctttaagaacaatacatacccaatttaaaacagaacattagcccctgatgctcctgtgtccccttcccagacctcattccttgtcctcctccctcagggaataatcactattctgaattgtactatcattccttttgtttgttttgtttaccctttatgctgttttgcatatttcacaaatttatatagattacattattttgttttaaatcttgacttttttgctaagactgcatctgggtttattcatcttcacattaaacaaaatacaatatctaattcatacatgctggtgttgacagatatctgagttgtttacagttgaagtctattaaaaacaagcctagtatggacattcttgcatatgtcttctggtagaaaaaggaaagagtttctctaagctaaataaccaggaaggaaattgctaggacatatggcatgtgcacactaaaaaaataccaaattattttccaaaatggtttccatcaagccacatactcaccaatatcaactattatcacatttttaaaaatggaaacaatctagtcagtgtaaattattatttcactatgatttaattttcacttccctgattcgaaattaggttggaccactttttcatattttctcttctgtgaaatgtttgttaatgtgttttgcccatttttctatttggttatcttttacttactaatatgcagtttcttatattttctaggcattaatcctttgtgagcatagacctcagtaacagaccctaggaggagcctaaccatagtcctaaactgaaactgaaaaggagggtactaagaaagaaaaaagcagtgtctatctacttttccctaggaactggccttactctaacagctaagaaatggtatttcctgtttgcaaagtaatgtgttcttatttttattttaaaaatatatttatattcaaaattccacttctgcctaaatatagaaagctagtatgagcatcactcctaccctaacaatatacataagttgaaaaaaaaacactaaatcaaaattttattgaacccattagagagctgaggttgcagggcaaccaagtagtctgcaatctaaggaaagacagactctcctaaggagtgacaggacatgaacactggctccctgtggcagttcaagggagaaagagataccaggcactatacaaatgggaaagaagtattcagacataaaatgtaatgcactgctgatagctggatgtgggccagtgtgacagtacagaacagcgtaaagccacagacacaaaaagaacttgcacacattcacagactcaagttcacagacctccaacaggtgctcataagaaagactgagagcagagcaggaaacgggaagaaccattccctcagaagggtaggcttggaggaggggagccactgtcatggtcgaaaatgcgtaaagccccacttagacctatttctcccagaacaaaagccttacactgcaggaggaggagcagcaatccctgctttgtataagtgtatacccactgcagttggaaacagagcaaacaaaatccatctattcctggagaaggtgcagaaaacagtcctaagcccaggatttaatgccattattattacaaaactcctaccactacactaagtgaaggggaggaaaccttctccactgtagacttgccaaaggtgtcaggcagagtctggatgccatgagaaggggtagtatcactaaccaagcctgtcactgaggaccagggacagaggacctgcccaaggctgagaatggaataggacaacaaagaatgacttggccctccctccccaggcacgcaagcaccagtctactgctggaagataggcaggagaaggaaagaaagcccttctaaagcacaggcacacaggggaggcctaaagctgaggacgaaacaggaagagaccaaaaataaaaactccttagcaccccagctgacaccctgcgcacaagctaaatcctaaggaattctaagccaatggttcaccataggtaatgagagcaacacaaaaccaaaacccagctcatgtcctaaatggcctaccagaggaataggcatgactatttctaggcataaattctatttactttagtctctttttttctacacccagtaccaacactcaatcagatatatagacacataatgaagctgcagcagctgcaacaacagaagccagtgtcaaaaagcaaagcaatcacagaaaaaaatatcagcaacaacccatctgtcagagttatccaccagggaattttaaataactatcattaacatgttaagctctatgaaaaatgcaaacaaaacgcattaacaacagagacggaatctgtaagaaggtgtcaaatggaaatgttgtacataaaaaacactgtgtgctttcaatgggttcattagtagacttgacacaaccaagaaaggaatcagtaaacttgaagaaaggttgacagaaattacctaactgaaatacaaagagtaagaagagtaggagaaaagaaaagtaaaaagcaacaaataatgttagtacagcttctttggaatacagtttgtctgttatacacttatgacccagcaatcccactcctagatatttaccttaaagtaatggaaacttatgtttacacaaagtttgtgaatatctgtagtacttttatccataattgccaaaatctggaagcaacacagtgtccttcaactggtgaatggaatactattcaataaaaaagaaattaaatactgataaatgcaatgacacagatgaatatcaaaagaattatgctaagtgaaagaagttggactcaaaaggctacatatttatgattccatttatacaataccttgaaaaagacaaaagtaaagagaatgaaaatagattactggttgctaggcaccggtggtagggtaaagggttaactataaaaaaatacaagagaaatttggggggagatagaaatgtactataccttgattgtgatggtaaaccttggtcaaacctcatagaactgtatgctaaaagggtgaattttactgtatgcctcagtttaattaagcatgttttaattaattaaaaattatgtctcgttttataaaagcatattcttataaactatttttgtaggagatctgcattttaataattgcataaggtgatattttcttaactggatttgacatttttcaaataaagtcattagagaagatgtttccaacatttgatgggatgttggttatggatgacctctaagatcctctccaactccaaggtttttgaggtgtgcatgtgatcccccaagtttacaaacacaaattttataaatatatatatatatatatatatacacatacacatatatgttaagtatatattcatagttctaattacatttatattatatatacatgtaaatacgtatacacaaaaagttctgaaatattcttcagtattataatttattatatatttgttattgtctttttttccactataaacatgtgataatttgtaatccaaaaatgttattattttacttacaaagcatatattgtgcaacaaatttttaaaaaggaaataaggaagcaggttatttttcaaatctataaaatacctagctttaaaaaaatggattttactaaactgacatatttaatactttaaaatacttgaagaaaggacaggaattagccattgtgaatatggggtgtggagcatttttttaattgcatttttttatttttaaaagaaaatcctagaaaaccatattttcccatttttgaagttttccctagctctttctttcatttgtattagaaatatctttgtgcatatctctaaaatagagcctcaacttgctactacaaataggatgatgtcataccagaaagtagaggggagagagcctgtgatggccctgcagcctcctcatcctcactgctccacctgtctcttctgaaggggcctctggctgtccacatgctgggatcactgccactagaaaagaaatgtatatatttgcccatggtttcaaagaatatatacatttgagaaatactttctaatcatcttcattgattatttaattgacattcatttccatttcaattcagccacccactcccattgtcatcacctgaaactggcccacttgtgaaataattcccaaatcccaatgtctgatcacaaactccatctcctcctactacttttaccttgcaaactagtcgcctcagatccatccacttatttaccttctcccctcctttacctagactgtgggagggaagtactcgggtcactgggctttctaatatcggcagagagccgtttggaaaataccagcatgtccctggttggtttcctgtaccactcttccatggcagcaaattccaagccaccatcttgttatagtccttattttaatactctctctgacttagtaaaaatgtaacttcttctagaaaatgcaagccagaaaatagaaattctttcaatttattatcttttaaaacatttacttagatgcatcaatgtctttcttattccttgctttctgcctgttcaaaattcctccttccgtgttcttaaccagattccttctgcctcctctaaggtatttttctataacttatttttttttaacatatcgtgaatttctccctatctacaaattctttcatatcataagaatacacaattttctgtatcttaaaaataggaaatgctttaaactctgtctagctactaattgttaacagatttttcaaatcctagcccatacccactttgtttcctttgcaacgtctccatactcaactgactcgctaatgctattaacttggctcttgttgcactttcatttgcaaccctacctagcaaaatcctcctaatttgacttctgcatctaaccttcaatgtttagagaaaattcttcctaaaatacaaacttaattacacctgcccaccaatatcaggataaatcaaggccccttatcagacacaaaagtttaggatattggccaggtggcctctgtctatttttccatcaccatctccactgatttcctacatgcactgtatgctttaaccttagcaaaataagtgcctttttcttttacttctgtaagaaaattcgggtttcttactcttttctccttctaatttttttcttggattactgtaaacatttaattaatctccactgactgccacttccagctatcctcaccttgccaccagcattcctccttctggatggataaatagatagttgcatgaataaaacaaaaagaccctccgtatgcatccttttgattttaacagactgaataaaatgtatactcagcttcacatatatggcattacttccctctccagcccacactgtattttgggctccacctctcatcttctgcagcttcctagcattccacctcacatacaccctacaactcttggcagctaatatttctccccattacccctaagatattttcacaactccttaccctcgctcaaacttctccctcttgcctgaaatgttcttctctttttcacctgctaggtttctatttaattaaatcctaaattcaaccaaaatatcttttcttcaaagaagcttgtgggaaacctccctcatgcatagtcaatcttctgtacccacaatctttggatttttactctaaaataatatttactatgttgtacatcaatttgtcttttatatgtctgtttccctaattaaactgtgaactaaagagcaaaaaatatatagtagtttgtatttgtatacagtgcttagtgtatcacagaatctcaaaatgtctttggaattactattatttgtttaatgcacttctgaaaattgtacatataaatttcatacaatacgcatacaaaaacacataatataaagaatatacacattcttatacagtgctattccagtgagggtagctaatattactgataaatctctaagaaaatatggcttaacaaaatgtttcctcatttgatgtttttgcttataacacctaaatttgaacattttataagcatgaaaacttgtttctttgttttcctaatggaaatttactgttcttcaggtactttaaattttttaaatatatactaccagaaattcaccatactaataaacctgttgtttataccatataattttctttctgaaaacagattacatttctaataacatttagtgctgtaccgtgagcttcatgctacctcaagtacactgaccacttcaaaagctccaagcatatttgcaaaagctttgacgccatgtaactattgagaggagagagaaatcgaatccttcaagaatacttttcccttatgttaattaccatatttttgagatcataaacatatttctaagaaagctaaatcaagtttataaaaagctatatcttgaaaaattaaacatttcagggccattattcactgtctccatgcagagggctagctatgaatataagtagcataaacagaaaacccactaaataagcatattagttatacctttctgaaggctcttcaaaaacatcctcataatcattatgtgggaaattccgaagagaaagttttaccttctctgaattaactttattttcaaaaacctacagacataagaaaggaaacaaattatagcactggttttagaaaaatatggtttaaaacgtgatttctatagctacttaagaagagcaaaaagatctgcaataatggaattataaccacaatcacatagtataatgtctgctcctagaaaatcacttaattgtatatctccctattaaatatcttccaatctgtcaaaacagtgtagagtactatgtaaacagaagttatttatattgaattgctcaagtgatttttcaaaactaaatttttaaaaagcttcatttgagaaaaaatagatttattacttcagcccagaagagattttcttataagtgtttaccatgttttgtttactgtgaatataaaattcctgccactaaatttatctttactttagtacttgcaccatctaatctactaattctaagtatttctccacattccactgcccaattttgcaccgggcagtggacttcagtcttgataactcgcagtgccagtgccccagccaccacatacacgtttccttccttccttgtctaatactgtcttgccatacttggccttctattttctcaagaacatcttttgaatcagctgatcaaatctcattcacacacagaaataactttgggactattattgaaattaagtaatatgaattttttaatttaaattggaaataagtgatgtatttatatattaagtatcattatccactaatatgatatagctatccagcaaaaacattataaaatattctcaataaagacaatgtataccttttcttagatttactcctaaacaccttaagtggcacaattgtaaatgtaatgtcatagagcagaccttttatttgatacacactgctcaatccacaaaccacatgtttttacatctagtatttttgtgtacattccattctaaatactttaaacttccattatgatttcttctttgactaatgagtttgttagtgtttgcttggtgtatgtttaatttttactttaaaatcacaggaaaatgtccacctaagattccttctcattaaactatgtagctacaatacacgaaatgaaatgagcttcacagaattgaactagttttgaaatcagcactgattggcaaatccctaaaaattaatttcaggataattaaaattgaaatgtagaaagtgtggctccagtgggatggaggaaaagaagtgggacacatgctattacacaacatgatcccacttccctcttatgagacatgcttaaaagtcatttgagtacaattcatttacttagaaaaagtgatatctggaagtcctaacacaatttaaacctgagacatctttcagctcatggttcaaaatcaaattgattatatttattttttaaagaagcagactgttccagatggctgcaattcaaatttaaggctgactaacatatgtctgattgagtgaaatgtgattttgctaacaataccaagaactaacaaggagaaatataataaattatcaagatggcaggacttttggagattgctcacggaatcaaattaatatcaaattttttaaatgttagaaaatgttttctgaggagcctaagttagcttttctgtagtccatgcagcaaggatttatgaggacaaagtgaaaacagtaacacagataggagcctggtttctagtctgtgactcaagagttatatgatcatagacaaatcgcttcagctttcacctctaaaatgagtgctggcataaaaatgtctttaacaggccaggtgtagtggcttatgcctataatcccagcactttgggaggccaagacgggtggatcacctgaggccaggagctcaagaccagcctggccaacgtggtgaaaccctgtctctaccaaaaatccaaaaaataaattagcctgtctcaaaaaaaaaatttctttatgctccaaatctaaccaacttcaagtctatgagtctagacaatttctaggggacagcatcatatctgaaaggacataaaaatggctacagtatcaaattgtttcatgaaacataagaaaagcaagttctaataaaatcaggtaattttcccaacactataaaaaccatccaggaatgttctaagatccttttttatgaaaggaaactttaaagcatatcagaattcaccctagataggccaagctataacttagcaaaaaaacaaacaaacaaacaagcaaaaaaaaacccaaagtaaaaatataaacaaaatcacaaaatgtgctcagttctagaagaagtcaaataagactataagactatataaaggatatacttgggccattctgtgaaggtgctccctttcaaatcgtctctgcttcaaagagaaaaccattctgatcagagaaaagaatcaagagtgagcggagagcccaacacggcactaacagccagagattcccagccaaagatgtgatggtagccttgatgtggccaacttaagtatagcagagaatggacaggagataataatcaagttacaacactgttcttaaaagctgcactcctgcccacctggggtggaggtggcaattgaacaggggaagtggtaggagcagtttttggtctatgtactgactttatctctattactcctgtaacttacaggaaatgaacacaaggccagcatcatcatcgcagttccaaagctccagttgactaggtaagagaaaaaaaaatgcaaagcacccaccagactaaaatgcatttccctttttttgtgctctaaccctagcactatctccacaaatggggtaatgtgttgaagtaagagtttttgtcacagacttttcacagccctctacttttccatagttcggagacacccaatcatgctgtctcaaacaatgaaaaagtccacaatcaatacatctaaaggtgcttcatacttcatgtgacatttattttgtatcttcattagtaacacaaaactagtgcctgtaaaatttccagagtagcattagaaaatgcaattcattagaaactttgcaaaaaattccactctttcaaatccccattttggtcactgtcaacactacagtgacaaaaaattaagaaatcattttggtgagaaccaaatagatacccatttcccagagagcatagtcagcaatttaggtattagccaaaattagtagagatccctctccttttagtcttacctttgatctaggtgtgttttcctgacttgatgaaggcaaagtctccctgaaattcaagtcttctgcttcagagtcatttccctcataatcgtttactgaacaaaggcggggggaaaaactgatcaaatagaaaacactatacagaaggaaaaatggagccttaatgagaaaaaacaagctacatgaggggcattttcatctacttttcctgttttccaaacaccccatctttatctcctatggtaatcatctctttctcccctgctttgaaaaaatcaacatagcaaagctgatccttcttctaggattatcctcagggagttgacttttgagcggttcccttgttcctcattgccatattattcaagaaagtactcttcaagtaaatcctagatatttacaacctgcagaacctatgcattgggatctacagaatacagtcttctgtgtttcagagtctatttcttgaataaagaatactgtgttacaaatgtcgcactgtaacttcttgtattatttataattcataagttagtaatatgttaaattatacagaaaattgttttcggctttgttgaataatgtaatatgaatcatcccaaggaaactctgggtttcttatatgattattcctaattactgtgttaattttactgcacagactctttcagataagaagccaagagaaaattttctctgatctcagtactgagcactcagagtactgtttctcataccatgggagccttaaatattatgatttagaaattctatggcatggcatattaccaaatcaataaaaatatagtaaacaagtactatggaaatgaaaaagtgtgttcctgaatgtgtgttaaaaaggaaatctaatagaaattatgaacctttataacacatgaattaattttataaattaaaacattaagaaatatcaatgaagggacaacatatcaaaactaatgtgaagtagctaaatgagtatttagatagagggaaaatgtataggtttaaatgtgtttacaaaaaaggcagaaaaaaaaagctgatataaatgagttttgtattcaatcatagaagccaaagaaaaactgaggaaacccagagaaactacaaaggagaaaatcataaagaaaaatataataacagaaaataagcctaaagaataatcagcaaaatccaataaactagttctttgaaaaaaaaaacttaaaaatacgcaaccctctttcactacaaatcaatggagagtaagtgcacaaataacattaaaaatgaaaaaggatcgcttctcggccttttggctaagatcaagtgtaaaaatgagaaagggcacagctacagatgcaactctcatttttaaaggtaataagcaaatattatgagaaactttagggaaatctgatgaaatggaaacttttataagagaattataagttatacaaatttactccagaagatgtagaaagcctaaatagtgtaataaccatttaaaaagtcaaaccaataatcaaaaatatcactcccaagaggaaaaagcatctgggcccaaacaggtttccagatgggattttatcagactttcaatgaaaaaaatctctcatgcaaacggttctgaaaataggaaattccgcaaacctaggaaggagcttcaagtgctagaaaaaaaattaacaggaaaaaaaagtctatgagaattgtaaacaagcaactcatagaaggcgacttacaggccaataatatattcagaaaaagtccagcctcacctgacaaacaaaaaatgaaaagtaaaacaacctacaattgactttcatttatgcttatgagagatttactgtaataggacttaaccacaaccaaccagaaaataggacaaaatatataaaacaataattttcagaccttaaacaacagactgtgatcccagagagaagggggtgagccttctggttgctccagattatggcctccagaagtttgcaggctatagctcaggaaaggaatcaacgagtccagtgattcaatgagttgagaagaaaaagatcaaagttaggagaggctgaggcagccagaatttgtagggcagagtaccagggaggagggagctatacagaacaagagaagtctaagtagctgcaaagaaaccctctcatgtcctttgcagaatatggatatgcttatatgaaggaggacaatctctgacactcaggaaggaccaccggaaagtagcaagccacacaattcctaggaacagttcatatgagccagaatgaggagaccctgtaatacagggggcgttgaggatagtgcacagaagagatacctcttagtactaaaactatccttggaacagaagctccttagggccacctataaaaaaggtgaagagcaagcctcagacaggatcaggttaaacttcaagtaacataactacaaggcagaaaaacccaacattctttaaagaaaaatcaaggccgggtgtggtggctcacgcctgtaatcccagcactttgggaggctgaagagggtggatcacgaggtcaggagttcgagatcagcctgacaaacatggtgaaaccccatctctactaaaaatacaaaaattagctgggcatggtggtgcgcacctgcaatcccagctactcaggaggctgaggcaggagaatcacttgaacccaggaggcagaaggttgcagtgagccaagattgcaccactgcactccagcctatgagacagagtgagactctgtctaagaaaaaaaaaaaaaaagaaaagaaaaagaaaaaagaagaaaaaaagaaaagaaaaagaaaaaatccagcaccaaaatcatataattcacaatgtgtagtaaacaattaacaggtatgccaaggaatagaaaagtataacccacagccaaatcaatcaatcaatagaaatgtacttagaaatgacagatgataaaatttagaaaaaagaacttttaactattataaatttttaaaaggtgctcaaggaaataaagaaaaacatgatacaataaaaagagatataaatcatgtaaaaataagacctactgaaatttctagagacaatgtatgaactaaaataaattaacagcagataaggcagaaggaaaaaaaatcagtgtctgtcaacatacagcaagagtatatccaaaatgaagcgcacagtagcgaaaaaaagagactgaacagactcagcaaactgggacaacatcaagtgaactaaaattcctgtaactggaatgccaaaacaaatatgaagaaataatagctgaagtgttaccaaactagatgaaaactataaaccaacagaccaaagaaggtcaataaaatacaaatgtaatatatgagcttatagaaaaatcacattcatgtatgtcatattcaaactactgaaaagaaaaaatgccagagaaaacagacacattaaatatagaaaaacaaagataagaatgatggatttctcatcagaaatcatgcatgctagaagataatggtgagacattttaaagtattgaaagaacatagaattcttatagaatgtcaatatagaattctataccctgaaaatatatatttcaaaaaataagacttctgtagaccaataaaaactaagattatatccagcctgcactaaacaacaacaacaaaagttaaaggaagtttttcaggcacaaggaaaaggataaaatatgaaaatgtagaactatccaaaggaatgaagagtggcaaaactggaaaatacatgagcacataaaacatactctttcacatgttctaatttctttaaaagataactcaattataaggaaaaataataatctattgtagggtatacaacactcacaataaaattggtatcaataatagcatgaaaggcaaatgggaggaaatggaagtatcttatgttcctacaactatatgtgaaatggtaaagcagttcccgcttacccacagggaatgcctagttccaagacccccagtggatgccgaaaacttaggatagtacttcctgcactgaagtcttaaatccctcaaagtcatccatgagggttaaaatcagtttttcccaaactcccattaatgttgacattttgacctcctcccataaaccacaaatgttcttaatggcgtctagaatggggagttatttccaaaaggttttcaatttactttgcccagagccatcagaagaatcactatctatggcagctacagccttacaaaatgtttcttaaataatgagacatgaaactcaaaattactcattgatttctaggctatggaatagatactaaatcaggaactaactcagtaatttaaaaaaacctaccaatcagaaagagcccgggccagaaggattcacagtcaaattctaccagatgtataaacaagaggtggtaccaatcctactgaaactatttcaaataattaggaagagggactcctccctatctcattccataaggccagcatcgttctgataccaaaacctggcagaacacatggtctaatatccagaacttataatgaacttataaatgaacaagcaagaatcaaacaaccctgttaaaaaatgggcaaaggacatgaacagacacttttcaaaaggagacatacacatagccaagaagcatatgaaaaaatgctcaatatcactaatcatcagagaaatgcaaatgaaaaccacaatgagataccatcttacacaagccagaaaggctattattaaaaagtaaaaattaaaaaaaaaatgtttgtgaggttacagagaaaagggaacacttatacactgctgatgggaatttaagttcaaccactgtggaatgtggtttggagatttctcaatgaacataaaacagaactaccatttgattcagcaatcacatcactggctatatgaagggatataaattgttccgtcataaagacatatgcacatgtatgttcatcacagaacttttcacaatagcaaagacatggaatcaacctacatgcctgtcaacagtggaatggataaagaaaatgtggtgcaaaaacaccatggactattacacaaccataaaaagaatgaaatcatggctgggtgcggcggctcatgcctgtaatcccagcagtttgggaggccaaggcggatgaattacctgaggtcaggagtttgagaccagcctggccaacatgatgaaaccctgtctctactaaaaatacaaaaattagccgggcatggtggcacacgcctgtaatcccagctactcgggaggctgaggcagaagaattgcttgagcctgggagatggaggttgcagtgagccgagatcgtgccactgcactccacctggctgacagagcgagactctgtctcaaacaaaaacaacaacaacaacaataaaaaaaaaaaaaaaaaaacagaatgaaatcatgtcctttgctgcaacatggatgtagctggaggccattatcttaagtgaatcactacctgggtgatgagatcatttgttcaccaaaccacagcaacaagcaatttgcccatgtaacaaaccttcctatgtacccccaagcctaaaataaaagttggaaagaactagtctacaaaaaagtttgggtagctttccatgtttttgcatattctagcttaactgatttatcattaaaattagctttttcataaaagtttgcaactgttaaaggatagtttccagaaaaagaaaatcacagctctcatacagacatataaatgcacatgttactttattatattcattaatcagtgagggaatcaggcagatgttatttttaaatttttttttaaaaaacccataatactgtgtgttagtctgttagcatcactacgtaggaatgtctaaggctgggtaatttataaagaaaagaggtttgttctggctcgtggttctgcaggctgtacaggaagcatggtgctggtatctgcttctagtatctaacctcaggaggcttatagtcatggcaaaaagtgaatgaggagccagcaaatcacatggtgagagacaaagcaagagagaaggggaggttccagactcctttgaacaatcagatctcacatgaactgagagagcactcactcatcaccagggggataacaccaagccattcacgaaggatctgcccctatgatccaacatctcccaccaggttggggattacctttcaacatgattagaagagataaacatccaaactataccatacaggaagtccttgccagagcaattaggcaagagaaacaaacaaaaggcatccagattgaaaagaaggaacaattaggcaacagaaacaaataaaaggtagccaaattgaaaaggaggaagtcaaatttgtccctgtttagagatgacatgctcttacaaatgcaaaaacctgaagaatccaccaaaaaactcttagaactgataaacaaattaagtaaagttgcaggatacaaaatcaacatgcaaaaatcagtagcatttctataaaacaataacaaactacctgaaaaagaaatcaagtaagcaatctcatttacaataactacaaaaaataatacctaggaataaatttaaccagagattaaagatctctagaataagaactataaaaaattgatgaaataaattgaggaagacacaaaccaatggaaagacatctcatgttcatggaataaaagaataaatatttttaaaatgacaatataaccaaagaatctgagagctcaatgcaattcctatcaaaataccaatgacattcttcagagaaattttaaaatcataaaattcatatggaagtacaaaaaatactccaaatagccaaagcaattctgagccaagaaaaacaaaaacaaaataaaaacaaacaaacaacaacaaaaaaaaaacaagaacaaagcttggggtattacactacctgacttcaaaatacactacaaatctatagtaaccacaaaatcatgatactggtataaaaacagacacatataccagtggaatagaatagagaacccagaaataattccatatgtttatagccaactcttttatgacaaggcacaaagaacatatattggggacaagaaagtctcttctataaatggtcctggaaaaaactggatattcctatgcagaataaacttagactcctatccctcatcttacacataatctgacttacagatggaatccaggctcacaaaagcagatagcagaatggtggtttccagggtatagaggaaggaggaaatggggagttgttggtcagatggtatcaagtaacagttacacaagatgaatacgttctgaagatctgatgtatagcaaaatacatacaatactgtattgtaatgatatttgctaagagggtagatcttatgtttgtaatacacacatacacacaaagaaagaaaatggtaactgtgaggtggtggatatgttagcttaattgtggtaatcatttcacagtatatagacaaatcaaaacatcaagttgcacaccttatgtatacacaatttttgtcaattatacccgataaggattggaaaaacacttctagggagagagcaataataatgacaaggagggcggatagaagagggaatagaagctgggctgaaggtggaaggaatgagaaaaggcataaaagacatactgaaaaatgatggcaagctactaatgttttaagcaagacaatggcaatatgggtcggctgggagacagctgacatttaactaaaacactgcattagtagatgtatcaaaaaccttagaaatgtatatgccctgagttcacagctaacaaaattatggaaacaaacagctttgtggcagattacaggttgtttttattgtcttgttgttttctttgtgttttggtgcttttttgtacttcccaaattcttcacaataaacctatattacatttataatcaggaaaaaaaaatgccatttgaaaagggtaaagtaaaacactagagtttaattgttgttactctaagcgtgatggcttattagaaatgcagagtcttgccccccaccccaccccaccaagacccagaggatcagaatatgcaggataataatccacaggtggtccctatgcaaatctacagtctgagaggcactcctgtagctcctcctgatcccatacccacaaaagtagatgatgcacctaccaggctctgctctaaagtccctaggtgaagacatgttgttcccatcccctaaatgagactggtaaaaggcttcttcagaaaaggagccttagtgtcctgtgagtcaggccaaaggtctagttagtatcctgggggccagcaaacaatttttgttcacctggtaaaacacacaaagccaaagatttttctgttacacaactggagctatcacagctttgacatattattactcatcaattcaaaatatttaaaactgcaattttaattaaagacaaaataaatttcatttgaaattttatcaaataatttcaggatattccttgagaactggagatacgcttatttattcaaataccagagcttaaatatgctataccttgcattccacaaataaatatgtgaatggcccctccactccaatgacgtatctctttatataaacacacacacacacacacacacacacacacaaattcaatcaatgtcactcaatggaaactcagttatttaaacgccacacctaagctaaattaggtgctgagaattcagtactgaataaataagaattaattacagagaccgtcttcaaggagttcttgttcattcaatctataaaaagttctcacacagaataaatcttttttcttttctaattcttgccataaagggcctgtaaggccatgttacattgctcccattggttaaaaccaagaatacttttatctggagacctttccatttactacctgcaaataaaatggtattactataatctgaatctaaagttaatgtgtgaaacagatttattttaaaaactttgagatataggtgttaaaaaattatttaagactaggtgtagtggctcatgcctacaatcctagcactttgggaggccaaggcaggaggatcgcttgagctcaggagtttgagaccagctggggcaattgggtgaaatcctgtctctacaaaaattagacgggtgtggtggcacacacctgtggtcccagctacttgaaaagctgaggtaggagaatggcttgagcctgggaggaggatacagtgagccaagatcatgccactgcagtctagcctgggcaacagagccagaccctgtggcagaaaaaataaaattaaactaaattaaaatgtgaaagtaaggcaaaagataagtggaatgtcacttcaatgtcataaaataatgacaggccatcccaaagattacttatgtggggaaattgtactttattcagttcattgtttactactgattaaaagtcctagacttaatgcaattacaacgtaacctatagatttttgtccagcagtgatacaaataatttctgtctgataaggtaacactaaagattataatttatttctgtctggcattaaccaggttttcttaatctaatctagcattcttactctaacattggttcaaaacgccagtgaaaaacctagatcctcaaactgttctttgaactacctttgccatcttcctggtttcttcactaattaatacattgagtaaaatgtttaacctggtttcatttcaaatttgtgagtcacatttataatttttaaaaaactctgctttgacaaggggaagaatatcttttttaaataggaggagggctaggcacagtggctcacacccgtaatcccagcactttgggaggccgaggtgggaagatcacttgagctcaagagttcgagggcagcctgagcaacccagtgagacctcatctctaccaaaaattaaaaaaaagaaaaagatagccaggtgtggtggcactcacctgtagtcccagctacttgggcggctaaggcaggaggatcacttgagcccgcaagatggaggctgcaataagctatgattgtgccactgtactccagcctatgcaacagagcaagactctgtctcaattaaaaacaaaaacaaaaggatggcagtgttcttgtgactggcagtgaggtaacagatttcagtaaggagccttccctggaagcagacatgagatcttaaggacctcagaattaactaagaacctctaagaatgacacctaagcttctgcctaccaactatgttattgaaaagatacaaaatagtacaattttaattaaagacaaaataaattttgtttcgaattttatcaagtaatttcaagacactccttgataactggagacactcttactaattcaaatactagggtttaaacatgctatatcttgcattccacaaataaatatgtgaatggtcctttaccccaatgacttatcctctttatataaatacacacacatattattaagacctctccagtgcacagatgaatagactaaaattcatatcaaaccataccaatagtcagttgttcaaaccttccatcagaacagctttgatcagaaatgcatgcctaatcctagtattttaataaacaacagtgcagtgagtcacagataaccctacagaaacacaagaattaaactggataaatttccctttcctggcatgttttctagtatatcttaaaatagacaaaacaaagcaatattaaaatcattaacatttaattcaattttgagttgcagctactgtagtaaatcagtaataagatcatacaagtcaacatcaacacatgtgtactgaaattttaggtagcctagaaaagtaaactatatgataaaaacaaaatcttcatttgcagaagaaaacctttcagaaaatatagtgcaagcttttaccatatttcccacctcccctcaagcttggctaagtaagcccctgcaagtgcttcccctataagctccatgttttataatgatttctggactcatctcctcgggttggaccataagcatcttgaggacagaaactgtaacattttcacttttcaatctccagccactagactaacacaatggagacatggcaagaaatgtttgagggactaattagttaaattccataaagaatgtgtatgtatcaccaggtaactaatctgcatgtccacatcaagaactctgagaagtcacagaggtaccacttgagtgataggcactcggtcccttagggaaagattgtgaaagatattgagggaccagtggtcaggttcgtaagataaaggtttccctccaactcctggggaaggtgcaatagtatagaaaatagagaattagccctgataaaagagaaatccttaaaaaagtattacttattctgtgatagagcactgaggaaagaggaacaaaagctccaatatgaaacaaagtgatcccatctaatcataaataaaagaaaaactacaagtgtttggtttgctcaggaaacaaaagcaaaacacctttcctcaggtggcagggtgacataattggagagtcactgaatactgtacatattctcaaattctcagctgggacactattttcagtctatctcaaactctctcaaaactgaagcaggtgctaacaaagactatttcttcacagtggactttgggttgggtgcaagatgccaaaatagacaatgtaaaatgacatgctcagcaccttgggcctctggcaattcttagcaccagggctacttctaattcttgtgaaagttctatcatacactactccctgagacctatactagcctgaagagaagggaatgaaagaagtctcaaatgttcaatagtgacttactcttgccctacctgtaggcaccccagggatatgagttccttcctctgaaatctgtatttcctgtgactaaattctcagtacaagcttcttagactactagtaattatttggcatgttttatgccttttaataatggctcttagttttctataaggaatggtggtattgctttttctgattataaacataaccattaagaaatgtcattccgtggtttcttaatcaatcattccctgtagtgtgtgagtataggactgggggctcagagggaagcagggagaagtgaagtgctaaagtgctacctccagagccactgacagttctgcccaatgcaatcaggcaaaacaagaaaaataaaataaaaggattcatattgggaaggaagaaggaaaaccatctttacttgcaaggttaaaagctttatacataattacacctcaataaagttgacttttaaaaagccacaaaaagataatgtacttcaattaaaataaaatacagaaactctaggataaagataatatcaagttattaatgcaagtttaaacattaaaaaatagttgctacccactcatcacagacatgagcagcaagctcattaaagattactgtgagcattcattggaataatggaagactcaaggttccaaaggcactgagaccctatatcaacaatgcttcacccttgaaacccagggactgatgatgatacagttgccatgagctacattctgagtaaatactttatcaattattagaatggttcaagtaaaagtaatgaatgacttaagacatctttctgaaatgactctgttatctggatgcctctgctattagggtgcaaggcaaacaaccttctactgtttgtttcattcatgatataaattgctttggcatattccctccaacctcctgaacctcaggtcgatctgtttgtccatttgtctgtttacacttcttttcttccctccttcctacgttcctctccctctcttgtggaagtgtatcagtaattataagagggtgctttatttcagaagacacaattcctgtacctccaatcactgttaccaagcaaaagagttcactgttcaatgtgttagaagccaatactatggcactgggtttttgagaaaagaaagacttttttctaggtcaaccaacaaggagacaggagtctagctcaaatctgtcttcctgtactgtttttaaggcagtatttttattagaaaatgtgtagggagtgaatttggggatagtaggagattggtagaaggaaaggggggtctgaaaaggctttgggcatttgcagtatctcttcatgctatctcatgggtcacatatgtaaattcagggggagttagtacgaaacatgcagtggaaatttgggctgtggcgtcagcaagctcattctgtgtagactctagtttgctgtattggttccaactgatttcagccagttttgttatcttaaaagcagagagaatttcagtgtttcagaaagttgtttttgttttttatttttatcaaccaatcctataaattcaagaatttctctttgccactggttaactctttggggcacagtttcattagtagaccttggcctccatactccaaagaactacttatctactgggtgcagctgaaccatttccataactgagatcatgtaagtcaggaatgtatacacattacacatgtgtgcagacaaaagttcatgacttcacctaccaggtccaagacgagtctccttaggaatgcctgcatacaagcctggcccttggctggtgtctgggaacttggctggtaaaatcattgcctacactaatataaattttttctaaatgagaaaagtagctcacttctcctaaaacatctgttttccttctaggtatctggaatttcagtgactgctatcagtcacactgacagtctgtgctcatgactaacccctgataaaaaccctaaactcttaagctcagacgagcttccctgatagacaacacttcacacaagtttccataccttgttattcagaaaattaagtgcatcctatgtgactccacaaggagaatattctggggagtttgtatctgatatcccttgttgattttgctttctaccttttcagtctaccatatcttagccatgaatgtgactacctgctgaaccccatgaatccttctatccaatcgttgaacctgggagagctctgacaaaggctagcatgggaaaatacgttgtcttcctcattaacagacccttcttagttatatctcactttctaagttcctgccttccacttcctaggagagaaaaaactacacagcattacctgaacatcatcccagggtaatcacagagcagccatctccgcaaaagaaggaaaaatgaactgtgtaatgttgcaatatttttaactgcaaataattttgcatacaaggcttacctacaattgaccatttttgcactaaatgcttttttaaagtaacaagctaatatcttcttaatataaaaatatacatgtccaacaaaatttaacttgttctgctatcatgaaaagaggaattccagacaaatgtctcataatgtgcagtcagtgggcttatataaataaggactaaaattacaagctcaataaaagatcatcaaaccagggaaaactccaagtaaaattataatacacagttgtccctcccacctgagactcacctgagactcatactttccttccaacatgcctgttctgcctattccctcaagactcagacttcaaatgagttccctttaagtagataagaacagtttcgcaacggattccagaaaaaccaatatgccacctaaaggacaaggaaggcatctacactaagaaaatgaaaagaagtcagagagagaacttcctgacttactcagattatatacccatgggtccacatatgcctaaaggccaaccttgtccttaatctttagtcactcaatctataaaataaaagatttagaaaagggctatgggcaatatggatcttttgcaggtacaaaattttttaagtccataaactttctctttaaaacactgaagaccattagtgatggttataatattcttgtctgaactgagagctatagtcaggctccttttagaagccctgccatgaacagagaaaaaagaaaaggcatgttcctactcctctatcctctgtagacatcttctccgtgataagttaataatgagaagagaaaaccaaccttctagctttctcatcatttaatggtttgaaccctgagtttctgcagcctggaaaaaaaaaaaaaaaaaagaggaagcagcagcagcagcagcagcaagttctcctcatctgaaattcttccctctcctagctcaccttccccaccttctcactcctttgtggtcctcacagtcagatatgaggtaataggtggaaaatacttccctgtgataaggcagtgatgcctgagccacccacttctggtaagaaagctgttcctaaagaatagcaaatggtactcatgttttgggggactctatgctacttagaagcgagtggctaaagttgcacggtgactaattcaagaacaaacagaagaaaaggacaaacagaaaaataaacagaaagaggcatgcccttagcctcaatcaggtagttctaagaaagtgattaggatggttcggagaccaccagccccataccttatccagtcaccaaacaacccaggctggggtgtggttgcctggcaaccacaccttccatgtaccgagtatgtcacaaatatgtctttccggtgtgtgatctcttgactgtgaaaagtaaaacgctaaatcaattcagcaggctttgagtgtctacaatgtgctagtcactgtatcagagatgtggatccagggatgatgcaataacttctgcctccaaggagctcatagtttagtggacatctggcaaagtactcactgattcttgacaattcatataatcatatcaatagatgcaaaaaagcatttgacaaaatccaaattccatccttgatttaaaaaaaaaaattcttggaaaactaggactagaggcaaactttctcaacttgataaaaaatatctacaaaaaaaatctacagggagaatctagaggctttcccctaagataggtaacaaggcaaggatgttctcttttaccactcctattcaacatcttatacaacttctgactaattcagtaacaaaaggcatacagttgaaaaggaaaaaataaaactgccttgcttctcagatgacataaatgtctatataaaatatctcaaagaataaacaaaaacaattagccacttaatctataaaataaaagatttagaaaagggctatgggcaatatggatcttttgcaggtacaaaattttttaagtccataaactttctccttcaaacaccgaagacctggaacttagctgggcgtggtggctcacacctgtaatcccagcaccttgggaggctgaggcatgcggatcacttgaggtcaggagtttgagaccagcctgaccaagatggtgaagtgccatctctactaaaaatacaaaaaattagccaggcatggtgccgtgcacctgtaatctcagctactcgagaggctgaggcaggagattctcttgaacccgggaggcagtggttgcagtgacctgagatcgcgccactgcactccagcctgggcaacagagcgagactccatctcgaaataaatcaataaataaaaactcctggaacttaataagcaattacagcaaggttgcagaatacaaagttaatatgcaaaagtcaattccttttctataaaccagcaattaacaattggaattggaaatataaaacacagtatcatttacattagctgctccccaaaactgaaatatacaggtataaatataacaaaatatatacaggatctatatgagaaactctaccaaactttgacaaaggaaagcaaatatctaaacaaatggagagatatttcatgttcatgtatagaaacactcaatatttttaagacctcaattcttcccaatatggtttataaagccaatgtaattccaacaaaaataccagcaaattgtttcatgggtatcaacaaattcattctgaagtctatatgaaaacgcagaaaacccaaaataatcaacaaaatactaaagaagaacaaagttggaagacagataatacaagatttcaagacaagaccacaaggtactgttgaaagaatagacaaatagatcaatggaacagaatacagtatccatataaatatatccacacaaatgtagtcaaccgatctttagtaaagaagcaaagaaaattcagtgaagaaagaatattctttttcaaaaaatgataatggaacagaccttacacctttcacaaaaaaataactcaaaatgaatcacagacctaaatgtaaaacacaaaaactctcaaacttctagaagataactgtattggtgcccaagagctgctataacatggtaccacaaactgggtggcttaaaagaagggaaaacaaatctgaaaattagaagccttaaatcaaggtgtcagcagggctgcactctatctgaaggctctaggggagtatacttccttgtctcttcctgtcttttggtggttgccagaaatccttggacagcacgattcaactgtctcacacaatttaaaccacaacagtcttctctccaatcccccaaaagtcatatccttactgtatgcaaaatacattcaccccatttcaacatctccaggacccttgacccattccagcatcaactctaagtcaaaattgcctctaaatatcaactgtaatgtcccaaatctcatctcctaaatcacctaaatcaagtatgtgtgagatcctgggtatggtccagcctggggcaaagtttctctcctatggacactgaaatccacaaaacaagttatctgcttccaaaatacaacaggcataggacagacagtcaccttccaaaagggagaaactggaaggaaaaagtgggtcacaggtctcaaacaagtccaaaacatggcagggaaattttcattaggtttccagggcctgagagggctgtctggatccatgagtcaccaggtaatcttttcagtgaatggttgttcagccacacccttggtcctgtttcgggagtatgtttcctggattggctgagaactttcaaacccatcaagtgctggttcctttgcttaacaattccttcctcaagttatctctttccttttgcatttcactataagcagcaaggagaaaccatggccccatctttcacgctttacttagaaatctcctcagctcactgcctacaagttctgctttccacccacaggtaaaacacagttcacccaaatttctgccactctgtaataaggatcacttttcctccagtgtctgataatatattcaccacttcctttctaaggcctcacaagaagcacctttaaagttcacatttctagtaacattctgttcatgacaacatatgtattctctaagatgcaaagaatctatgatagatgctttttctaaaattcccctctctactgagccttcaccagaatcacctttaatatctgtatttctaccaatagtcttttcaaagcagtctaggctttttatgttatgcacctaaaaattattccagtctatacacaattccaaagccacttacatgttttttaggtagttattccaacagaaaaagatttcctggtatcaaaatatgtattcatttcctatggctgccataacaaagtgccacaaattggatggcttaaaaatgcagaaatgtattctctcacagttctgggggcagaagtctgagggtggcagcaaggccatgccctctgttaggccccagggaaggatgtttaattgtctcttcctaacttttggtggtttcagtaatccttgatgttccctggttatagacatcccactccaatttcagcctctgctgttacatgaatttctccctctgtgtccaaatttcccttgttttatagggacaccagtcattgcattaggacctcagcttaacttgtttaacatttgcaaagatcctatttctaagtaaggttggactcacaggtatctggggttaggacttcaaaatattctcttggggtataaaattcaaccacacaacaataataaaagagaaaatctatgtgaccttggttttggcaatgagattttaaatacaacaccaaaaggataatccaggaaacaaagttgataagctggactttattaaaattaaaaacttcttttctgcaaaatacactgttaagagactacaaagacaagctacagaccaggagaaaatgtttgagaaagcacatatctgacagaaaatttctaataaaaaataaacaaagaactcttaaagctcaacaatgagaaaacaaacaacctcatttaaaaattggcaaaataggcatgccactgcaaattccgtgaaacaggagaaaaactgtgagttcccaaagtgtaagagggagaaaaccgacctccaaacacacatccctgctgggaatctgaaaatccagatcacaggagaagaatttaaccttacctagagatggaagggatttagagagtcacacaaaatatgaaagtagaagtagcagcaggaagtgccttgtatgcactcccagtctccagctcgagcacagggacgccatccctgactatatctcactggggcccttgtggaagacaaccagcagaactgcggaagtgttgtggggtgaagaaagctcccagatgaaattggtagtggtttcgactgggcacacattttctggagtggagtccaaggaaggagcaggagctgctgcagatacaagcaagtacaggagtacaagaactgccaccaacagagcaggggcaaggtctgggcggggcattgcaggatatgcgggcttgccaactgcatgggagttgagtcaggcctcttgctactggctatccctgacttccctggcaaactatataatacagtagaggcggccaagatcccctatggaacataaccccattggccggagaaccaacccccagcccccacagtggcctcagcaagccccgcccaaggagcttgcctaaccctgctgcctaaccagacctgcctaaccctgctgccacctgacggcatttccctacctgccctggtagcctaacacaaaacatagaaactctggggagcttcatcccctgaaccctgcccccagcaccctctgctctggagggttgtctttaattgtctatggagcatatatatatactctttccctatggtatataagccctgagtctggggagtaatggtgtgaacatctacctgtcttacacgaacacatttctgcccaagaacacatttctgtccataagtttcccctaaaaatcaccctctgccaataaactagatatgcctgcctcattctttgatttcttggctccttctgtatttggaggttattttgcatatatggccctttcaaggaatatctatctatataaagataaaacaataagctatcaagctataataagatatggagaaagcttaaatcaatgtttctaaagaaaagaagccaatttgaaaggctgcatactatataattccaactatatgacactaggaaaagcaaaacttttgagacagcaaaaagatcagtggtaagcaggggttcaggggttgagctagaataatgaacagaagaagcacagaagacttttagggcaatgaaactattttatatgatactataattgtggatacatgacattatacatttgtcaaaacccatagaaatgtacaatataactagtgaaccttaatgtaaactacagacttcagttaatactaatctatagatattggcttattaactatagcaaatgtaccaaacaaacacaacatattaataacagggaaaaccatggggctgagggggtatagggtaactttctgtactatctactcaattttttaataaatctaaaactgttctaaaagtagtctgtaaaataagatttttaagagcaaacagaacaagaattttaaaagataattgtctgaagcacaaataatgacaattatatggtgcactttataagatatgtagatgtaaaatgtatggcaatcataacacaaagtatgggtgggaaataatggaagcacactgttgtaaggtatatatattatactatatgtgaaatgatatattatttgaaggtagactgtgacaaacttatacagcctagagtaaccactaagaaaagaataaaaagaaggagaagaagcatggaggagaaaaagcagaagcaacataagggcagagtggagataaaatggagtaaaaaattgagtcattaaagaaagcctcatttaagccaaaagggtatgggaaaagaagggactagattaaagaacaggtaaggcaagcgcaaacctggcaagatgatagattaagatctaatcatatcaataattatattaaatgtaaatggtctggccatccaaattaaaagtcagggattgtctgactggattaaaaaagtgagatccaattatatactgtctacaaggaacccaccgtacatataaagacattgataaactaaaaaaatggaaaaaagataacccatgtaaacactaatcaaaagaaggtagaatggccatattaacatcgacaacatagactttaaaaaatgataaacatttccagaaatgaaaaggggcattacataatacataggaattctaaatgtgtgtgtatccaacaacatagcttccaaagtgataaaatgaaaactgaaatgaaaaaaacagaaaaatctacaacaatgttggagacaagtaggcagataataaggacacagaaaacctgaacaacattatgaagcaatttggcctaacttttatagggcatcccagccaacaacaaaataagtattaaagtggacacggaacattcacaaggatagtccatattctgggcctaaaaacaaaccataaaacattaaactgaaatacaaaatatgtttttaaaaatggaattaaaatagaaatcaacagaaataaacctttaaaattctaaaatatttggaaattaaacaatatatttctaaataactcccaattcaaagaagtgacaaaggaaattacacaatattctgaattgaatgaaggtaaaaatacaacatcaaaattagtggatgcagctaaaacagtgctgatagagaaatttatagcattaaatatttatattgggaaataatagaggcctcaaatgagtaatctaagttcttaccttaagaaattaaaaaagaaattaaatccaaggcaagcaaaaagagggaaataataaagaggaaaaaaaatcaatgaaatggaaaataaaaaaataacagagaaaaatcaatgaaacccaaaacaggtccatgaaaagattttaaaaaaaattgctaacctctagaccctcaatgtccagtagaactttgtataatgatgaaaacattctatatagcagcaccctccaatgtggaagccacttgggactactgatcacttaaaatgtggccagtgtgactgaggaactcaatttttaatgtaattttattgaaattaatttacatttaaatagacacatgtgactagggataactattgaacagtgcagctctagaattgactactgaaagaaaggaaggggtgggaaggaaagaggaagaggaagagataaaggagggagagaaagagggaggcagagaagatgagatacacaaataaccaaaatcggaaatgaaatgaaaaagaggacttcactacagatcctaatgttagtgccattaaaaggataataagaaagtattacaaacaactgtatgccaaagttgataacatagatgaaaaaaactaattccttgaaagacacaaagtactaaagttcactcaaaaagaactgagtagcatatacaatctgaatagccatatatagttttaaaaacttgagtccatggtataaaactaacacaaggaaactctaggcccagatacctccctgttgaactctaccaaacctttaaggacgaataacaatcctatacaaaatgttccagaaaatagaaaagagaacactccaaactaatttatgagaccaccattaaccttgataccaaaatcaagaatattacagaccaatatctttatacaccaatatccctcatgaatgtatatgcaaaaaaatccttaacaaaatattatcaagtagaatagatttatttctccatttatttggttttctctcttcaatgttttagagtttttagtattcaaatattacagaacatcattagatttatccctcagtttttcatgtttttgataccattgtaaactgtatttctaagttttaatttccaattgttcattgccagtgctaaatacaattgatttttgtatattggcctcacatcctgtgtctttgccaaagtcatgttatttctagttgcttttttgtagattcctcgggctcctacataaacaatcatgttgtctgcaaataaagacaattttatttcttccttttttatctgtgtacatttatatcttttccttcctttatttcactgactaggacctccctataacgaacagaaattgtgaatggaacatccaatgtgatgctggtataagaatagacatatacctcagcaggaaagaacagagagattagaaataattcacacatagcaacaattgatttaggaggggaaaggtgccaagataatataatggggataggatagtgctttcaacaagtgtgtgggaaaatgagacatccacatacagaattatgaacttcaccccatactcatattatgtacaaaaatccactcaaaatagatgacagacctaaatgcaaactctaaacctataaaacttctagcttaaagcttaggggaaagcttttgtgacactggattacacaaagatttcttaagacactaagcacaaaccacaaaagaaataattgataacttgactttgaaaaaatcaaaagcttctgctcttcagaagacagcattaagaaaatgcaaagtcaagtcccagtctgggagaagatatttgcaaaacacacatctgaggaaggacctatatcctaaatatatagacccttataactcaaaaagaggacgacccaattttaaatagtcaaaagatgtgaacagatacttcaccaaagaagaaacatagatggcaaataaatatatgaaaacatgattaagacaactggtcaacataaaaatgcaaaggaaaaccatacgaaatactgctacatacctactagaaatgctaaaatcaagcacacacacacagtccaatacaaagtgattctggtgaggatgtggagcaaatggaatctcatgcattgctgctgggatctctactcatcatcttgctttatttttcccaaaaccactttttattaccttaaagtttgcttacccatgtaagtccatatatatcttctcacatgtttattgtctatcttccccaatataagtactatgaggctggcaacttggtctgtcctgtcatcactgtgtcattctggcaccaagaacagtgtctggcaatctttacatatttattaaaagtgaggaaggggtggaaagaaaagacactaagacatctataagtgaatatatgaaggcaaggaacccagtcacagccatctacagaggagcgttaagagaaaattaatttagaccaccaggaagctgcatgttgtaatgcatgattcccaatttcagctgcacattagaattagctggagagctttgcaaaatcccaattccaggccacaccagaccaacaaaatctgaatctctgagaatggaacaccagcactggtcatttttttttttttttttagacggagtcttgctctgttgccacgctggagtgcagtggtgccatcttggctcactacaacccccacctcccagattccagtgattctcctgcctcagcctcccaagtaactggaactacaggtgcatgccaccacgcccagctaatttttgtatttttagtagaaatggggcttcaccatgctggccaggatggtcttgatctcttgacttcgtgatccgcccgcctcagcctcccaaagtgctgggattacaggcgtaagccaccacacccagccaagcactggtaattttaaagttcccaggtgatcccagtgtgcactcaaagttgagaatcactgaaaaaatggaacctagaccttggaaatgtacacaactgagtgtgcaagctacttaacctcccttagcctcaaaattctcatctacaacatgggaaatatatgtacctcccagagttgctgaaatattgagattctatataaggctctcaggaaatgtaaattctcatccccaagggaaacttgatcaaatcttcatagcttagggtaagaaatgctaattctaccagcaattcacatttttcattgttagctgattattttattgaacatttacattgaggaaattcagaaatgctcatttttccactttcctggtggtaagatgctgcctgaagctatgtttaaattttcaagagtaaataaactatggcgggaaatctagctgactatgccagtgaatctcaaacctagctgtacattagaatcatctcagaaatttttttaaagaaacacacgtatgtccagaactcaccaggccaaattaaatcagaatccctggggtggctccagaatatcagtattttttaaaaaagctgatagaaaggtaattgtaaaacacagtcagggcttaaaagcactgatttgtactaacgatatgccatgctaactgcacatcacagtcacttggggagctcttaaaaaagttgattgattccagaaccctaccgagacttactgattcagaatctgtggaagtggagcctgtcattgtgcaaatcttcataaaactccccactggtgattctgatgcaaactcactgagaaccactactttgtatcatacatttactctacgtgttgtatatcagaaagatcatttaaaactttcagtggtctcaaatgccaagcctgccagttacttttaatcagtaactgacacaacacatcacagtaactccaatgactttacagatcttttcagaacacttttatgtccagcccactgacccacatcacctaccctatgctgtgccaaatactggctatgtagtccgttggtatttctaaccaaattcctctaaatgggctgctgatctgggaaaagcaacatggaatcacattactccccaagccttattcccctttgctaagtggtatgtaatgccaggattaatgaaatgaactctattggtcaaatgagtctgaatgaaatctgagttgttgtctgctcctggaagcaaactgttatctatttgtttccctcagagagataaactcagaggaaacaggagtgatccctgaggtgggaataatatagtgggctgcaattttaaaactctgcttagacaataacaggacacttggaatcttattttgatagatcaaaccaatcagtatatacagcaccatggtggtactaccaggcaggtgataatagtagcatttaaacaaccaggcactatattaggcatattaaatatattaactcatgtgattctcaactgcgatgataatagccctatcaggcaggtactattattatttccattttgtcaaaaaagaaacaaaggcacacagaagttagatgatttacccaaagtcccatagctactaagtggcagttttctgaaaccaggcaatctggctttggagtccaacatcttaagtactccactgcaatgcagatgagtgatggccaagcagtttaaaaaaaaagaaaaagttattgtctgcagtagaaactggaggtcagggtatgggtaccttgggcaaattacttaacctcttggagcctatttttgcatctgaaaaatcaggataataattgtacctgccttgtagagctgaggtgatgattaaacaagattaggcatgtgatgtgcttagaaaagtacttggcacttttaagagctttctgtcagccattattattatttgtattttaaaacagctcaagtggtcagggagaaatgaaaatctattaaactgaaaattttcctgccaatcttagatttgtagattctgtagattaccagtacatcagatccaatatgaaatgcagtcataaaagattttcacaaaaacttaaggactgtcactgtgacaaaccccagcccaaacagtccaggacaatggctctaaaaagcaaacatcttcaattatcaagctgtgtacatgtaaacacaacaggaaccagacttctgagtagctgcaaactgcagttctctgtgatgggagaacatgccccagaacagcctgtcaagtggtaattgccagccatcctcagtcacatatgtataaacagaaaagaaaaacaaaacgagggctcaaataaaaagcgttaacattcattaaacgcctgacactctattaaatgtttttcatgcattaccttctttaatcctcacaacacccttccaaagttgaacatgaaacaaccacactggtttatatcactttaaatgtaagactacacgtctcaaatgggccctgagcactgcctgggaatccaactctatttctctagtacgctcactttcaccctctctaggactctgtcacatatctctcctccaagttcccacacctttcctctcccccgctgccctccctctaagctgatggatgcctataccaatagactcttttcccaccacccactgtatctgcacctgttatctcagcttcccctctagttacaacagagtaagtgtccctgctcatttcaaaaccaactactcacctgcttagggtcttctcctttctcaggtattcaacaactaccctttacaatgttcccctctttcatctgcagcagtttttcctttctacgagtttaatcacattgccatataaacattctgctttcttctatcttgaaaaaaactctacccaaccttaaggcccctcttccccattaaagttgttcttgtcaaaatgattaaaatcctcctaattaccaaagtcatcttatacggtaacattcaacatggttgaccactacctccctcccttttttggcttcgcctcctcttctttgtgtacactattaaactagatgtcttcaccagtcccatatattttaaatactatgtacagtatatgatgccgattccaaaggttaactctagcccgacatcctccagaacttcagatttaaatttctaaaaagcacatttgatatctcaacccaaatatctactagataatttatgtgtgtatatttcaccatactaaaaaaaactaccaggtgactgataaatggagagaaggtgaataggtaatgtgaaaaatcaaatgtgctaaatattcatggcacctgtaggtggtaggtggtcagagtcctctgcaaaattcttcccagctatgcttatgtcttctattgggaaaaacctactgggcatctcaaacctaacacattcaaaacataagtactgattccacaacttccaaaaatgaaacctaccccatcctacagttttccttgagtcaaggctagcatatgagggccttggcatatgggggcattgcctatcgcgttcatagatattctgagcttctagaacagcatctggcacacaggaggcgttcaaaatagctgctgaatggattgatgaattcatgttctttctttctaggtccctcgacctccacccgcccttgagtcattgggaagttctgggctgtctcagcgcctgatgatggcttcttaccaatcataccacacggctgctcctcagggagttggtggcattcccctaccacagagccacagggttcctgtcccggtcccgtctcgcataggcgccccaacacgcgtcacagtgcagctggcatcacacggccagaatcacgtcctgccctctggctgcagcgacactacttcacagctcaggcccacccgggcagtctcccgggccagggccacaacccacgccttgtgacccctgcacgtcaacggcatcttccttcttcacgcccgccctcccacagcccggcgcagcggcctcccgcacgccccctgcccacctggcccccagccacctttcctcacctgggcctgcggggccgccccaactgtcccgctgcaaccccagcagcctcgccagttgggtccacgcctagcctgccggccttcgtcgctatccaatcccacctgcgcccgcgagcctgcgcactggagctttgccctgcgccgcggcactctgccctgcgccgcggccctctgcttgccaggccgggagagacagaacctgcctctaccggtcttccaaggcactgagagcccatcgccgcggacgccgctgtaaattccctgcgggccctgtgcaccaccctgtgcgggtccccctctcccaggccaggctgataatgtcaacagctctctgagctatgctcatatcctgaaccactgaggactgtgttctccaggaatgctcgcctgacccacgcctgccctctaagcccctaatgaggccccagagggctggggtgggggggtctctttgtagtatcagagcagggcagataggcaaaaggagtcagagcctgtgccagaatatgaggtcagttggctgctaggtcaattaagacaacttcagcaagggtggtcaatgtagagggaattcaatcgttggcattgcctgaaaacaggaagccagaatctttttatcttgacgaacaaacctctattcattggtcctgacctgagccactttggtgaatccagataccctgaaggtgtgacaagacctgcctcacttatcccccagccttcagtgctggtcccacagagagccatatgcttgagctgaactgcagttaagcagtgacagctaccctctgtccaggctctgaggccagccttctgctccgtgagtcactgacagtgagtctctacagagactttttctttctgtagcagccaaggtaccctgcaagcaacccacgccattgccatatgtcttagtttgtttgtgttgctataaagcaatacctgaggctgggtaatttataaagaaaagaggtttgttagtttcacagtttcacaggctgtaaaagaaacatggcaccaccacccgcttttgatgagggcctcaggaagcttccactcatggcagaagacaaaggagagccaatgtgtgcaagacagaggaagagagagaggtgggaggtgccaggctcttttccatgaccagttctcatgaaaacaaagactaagaactcactcagttccatgagactagcaccaagtcattcataaaggatctacccacatgacccagacacttcccaccaggccccacctccaacattggggatcaaatttcaacactagattttatttatttatttatttattttgagatggagtctcgctctgtcgcccaggctggagtgcagtggcgtgatctcagctcactgtaatctccacctccccagttcaagtgattctcctgcctcagcctccccagtagctgggactacaggagcatgccaccatgcctggctaatttttgtatttttagtagagacgaggtttcactgtgttggccaggctggtcttgaacacctgacctcaggtgatccgcccgcctcagcctcccaaagtgctggga

SEQ ID NO: 490 - DNA, 736330 bp, Homo sapiens
  source 1..736330: mol_type = genomic DNA
acgtttaaaacacaagaaccatgcgcggtggctcacgcctgtaatctcagcactttgggaggctgaggcaggcggatcacaaggtcaggagttcgagaccagccttgccaaaacggtgaaaccccgcctctacaaaaaaaaccaaaataaaacaaaaaacaaacaaaaaaaaccaccaaaaaaataatcagccgggcgtggtggcgggcgcctgtagtcccagctactcgggaggctgaggcaggagaatcgcccgaacccgggaggcgaaggttgtagtgagccgaaatcgagccactgtactccagcctgggcgacggagcgagactccgtctcaaaacaaaacaaaacaatcccacgtcaagatcgctttgaaacacaggcagaaaaattaggcaaaaaatgtcaaacggctaattaccttggctcagttacacatttactcgaaagcccgcctcccccacttttagccccagcgttaagaatgtaaaatagggcgcttagaagtctaagcgataaagatcttcttaccgagagccaagggacaaaactcattacagataagcctagtcctcccatttcccccggacgcctctccccgattgctaaagaagcagccgctccccgggtagctgccaggaaatcagtccggccccgcggcgctgctttcaccctgcagggtgtaagaggcgcacttcctgcgccctccccgcggccaaaccggggtgcgggaaccttctccagagaagctgcgagttggggaaactccgccaccgatccatcgtggcgccgggaaaggggatgcggggctcggaagggctagatttcgcaatcctgggatcgacattcctcccctcccccactttccccagccttggactgggccaatgaaagcccgaaaaagaaaaaaaaaaaaaattaaatctcaatgtagccggagtgcaaaggccgctcggctttgtttcccggcgggggaatgcgctgtgttggaggcgcgaacaggagccgcagacggtgagcctcaccgctgcaaatgccagggcagtgaagccgaacagaaaaccccatcgctttaaaaaggcagctgtccgccctccccctttcccctcgccagggcgaggggcccctcaagtccgggatccgcgagctgcgcggaggatctcgccaaacccgagcaccgtgcggcgtcttttaagagctcgaacaacgggaatccagcaaaaaacaagccggccccagaaggcagcctccctcctctctccgcgcacgggctacaatcgcccccagtccccaaactgtcccagtagaggccgcgcggagagagcagagccgagggacccagcgcaaggcgggagccaagcgcggctgctttaagaacgcggagagcgcgcgcccgccgccagctggcccgggctgcgcgcccccgccgccaccgcgcgccccctgttcgctcgctccttcgctcgccggctttaaagtctctgccaggatccatgctcacatgttacttcctgtatggaggcatggccagtttccagccccgcgctcttcgttccttcccagcctgcgccggagccacaactttcaggagcatggactgaaggcgccctcgccccagcgcccctctgagatcctttgtgttttcctccgtttcctccggccgtttctattttggggggctctccgctccccctgcctctcccctccccttcccctctcgcaaacatgcctccttccttcccggggccctggaaggagctgcctgcctgaagcccggagacgccgcgccgcgctcagccccgccgccgcccgccggctctcgggctgtgctgcgctgccgactcaagttggggatcctcggctgctcgccgccgccgcccgcggtccctgcctgccccaggcccggggcatcgccgccggccgccgactccgcgccctgcccgatcggctctctcctttttaaacggaaagcagcctttctccgccgagaggatcgtccccagcgtggctctgcgttcccggtcactttttgagattttccggggggcgctcggcggcttcccggattccaaggggactcgggccgccgagcgcggggggcccgtggagcgggcgagccggggaagcgccccggcttagcggaggctcgcacggaggcaagaacttattcaacaagtttacctccctgctttcctcttttcgatgtgcgttttcggacatgcggaggttactggaaccgtgttggtggattttgttcctgaaaatcaccagttccgtgctccattatgtcgtgtgcttccccggtgagtgccggccgccgaggggatgcggccccggccggcgcgcgttggggatgcggagttgtcgcctgggcgcggagctccggcgcccgtccgggagaccctggagagggtggagggtggcccggcgcccggataggagaaaaggattgctccgctggcttggatgatgtttagggaggcaggctagtggtcgaggaaggtggaggcaggggctggccggggagggggctgggggacgcgggggtctgctcccgctcccttttgggggtcctggggagctggaatcgggagaaagggggacttgctttgctgactcgtcgccgatcgggagaactcgagttgtggggcggttggggagactgaggccatggaaaggatgcttctgtgggtttggggggcccgggatgagccccctcgctctggcgggtattgaaggaactcagaaggtgggggtttgctttgctgttctccatccctttgggagggctaggtttcggggaatggaagtcggaggctggctgcggaggactgaggatgtgtggggagcagcctgcgttctgggtcgggggcgtcctccctctctctgggggctggggcgcgggcagcacttcggtgccggcgtgaggcagcctccttgggcgcagtgagacggcagggcgcaggcggtttcggagagatccgtgtctcccctagccccggcccgtggccctttccctccgctgctctgctcgattggattgcctgggtctggacgcggggagggggcgggggcggtttcggcggccggggcggtttcggcggccgggttgctgttcgcgccggggctgatttttttcctgtctcgcgcgccctgcctaccttcatctttgcccttttgcaggctgttcgcggctggcagacccagtctcgctcctttctggccaggttaagacaggaacaatactggccgttgataagaataaatcaccgcacgtaacggtgtgcggctcggcgaccctccacttccagctctcagctggcagttccccctcctctctcccctggggagggcagaggccagctgcctccctctcctctcttgcaggtcccccgggcagcagccccgagctccctcgtagctgtcccttggggtggaggccaagtcctgccctagcccggggaagggctggaagaaggggtgatttgcttttcatccctcgctcccctaaggacagagaattccccgtttttctgccctctcatccatcaactcctgcatacccggaggtggaggttatctgaatcaagaaaaagaggaatgtgccccgaggtctccgctctgcctggttacagacgcctgtcctcgggcggctggagcgcccgtttttggtgcagcgggtcccttagtcccgtcgtgcgacccggagcagggcgcgcgggagccctcgtcgcccttggggatcccctcgggggactggcagcgaatgccccctttgcagaatcggggatggcctcgaggggcagaaagggaaaacaccgtctggtattctgcacccccttttctctctgcgcatcctcctgcccgcggagcggcacggagctccagcccagaaacgcagctcggaggccgagctaggacgtgcgtccacactcaccctggggtttgcccactggagtcctgcctctacggtaggacactggggcctggggtttgcccactggagtcctgcctctacggcctctacggtagtgtaggccatggggacatctccccttagaaacagctgccttcattcactaaaagatcactgctcagtatttgggttaatcatctctcctttctagtctcccctgctttaccacggacttgacgactgagcgggctcaggtgcacacaggggttgagctttgtgagggccactctttaatgggtgcagtgggaggtcgtggagggctgccttgcaaattagaggaatttccaattccacttctgtccttcttgcgctcggggatgcagtcagtgggctgaccgtggttttcttttccctggtgtgtgaggaagcttgagatccaaaatgggactgccagggaaccagccttcgtggggcttggaccattttcgtcttctcattttcttttcgcgcccacgctgcgaggtaaatagcccctttcctggtccgggagccgaggggtgtgggaaagggaaaggacagtggtgggaggcgcagggaagagggcggtttggtttggaaaagtgcagcccgagagggagcagcaggctttggagcaaggtaaagttaaaatatcagagctctgggagacgctggcttttcgttttccgaggttgccgcgacgccgctggacctcagggggcgcccccgagccactggtggggctcctgccacctccacactggtcggcctcggccacctccacgcctcagggatggggcgcgcgtgcccgggttcccaggctctggggctgcagacgcgccttggcgcgaggcggcggcctcggcctggcgatgctgctcctggctttctcgaaacccgctgggggctggagttagccttgggacccctacttcttgcctgctatgacctcgaaagcgcttatctgtttgacatgagggataaaaatgcttctgttttggagtagggtcgtccttgtgaggtcttagccaaaatccctttttatttagtatttttgtgtttcctctcagaatcataactcagcataactcttcagttgcatttgagttctcagctcctgttcaggatatgggttagctgtagtttgggcagggttttggaaacacagccctggcatgagctttttcccagtggattggaaacagtggattttagtctttgaacagcagtgtggcaggtttgggatccattcagggttaataatgcttcaagtgatgctttccaagtgcaaagctaagagtgttaccaaacatgatattaggcatattacattgctatatacatctttataaagcactgtagaaacgtttacaaaaatagcaaaatataatggatcccccacccaacttcaacactcacaactcaatcttctctcatctcttcctccccaacaccttattattttaaagcaaatcctacacatagttcattcaaactctgatacatatctccaatcactgggaatttaattgcctctgacacagtataaaatatgttacttcagagtgttaaccttttatctagtttacattctcaagctcagcagattttttttttaattgatttttgtctttcggccctcagagtgaaactctggttttgatatgttttgtattgtaattacattatatctaggatgctgccattggaaacagttcagatggataagctcagctgtgtaccttggatgtgtcagaattggaggctccatgattaatgtcgggtgaatcatgaatctccctctaagctgtctcttattttatttgcatgtgcgggctttagttctgatgggcatccgttatggccttaggaaaaggcaaaagtaatatttggaaatcagcaatctttctctttacagggtgtgagattgtacaggttttttttccctctccctcatgtatcatgtttgaaaatgaagaatctttacccagtctctaaactgggttcctttgacacagttatggaataaaatctttgatgtttccttctaaacagtgttcacatttgagggttgatggacttaaaacactaataaagataggcataaacagggccttttggaaataggggaagttgctgttgttgctgaaagaagaaaggtcataggaagggttggctgatgtgggaaaagtgactattccatagtgaagctttgagtatctcccattaattatggacctgttttcactgaataaaagattatgttgttgtttacatgaagcgatccagcgaatgctgatgatttaatgcagcaaaacaaacagccctttcagatttgcctttctattctaaacagctcccaagttaacagagtagaatcagttatacacctgtgtgctgattgaaagtaacttccttggcattcacgtgagatcacttaaaatgccctagagtagttactcaggagcctctcctactcccttgtctccctgccttttcctggagacttcttttctttttttgagatggagtctcactctgtcacccaggctggagtgcagtagtgagatcctagctcattgcaacctctacttcccaggttcaagcgattctcctgcctcagcctcctgagtagctgagtctacaggcacgtgccactatgcctagctaatttttgtaattttgtggagacggagtgccgccatgttggccagggtggtcttgaactcctgacctcaggtgctctgcccacctcggcctcccagagtgctgggattacattgctactgggctgttgctttaacactttgcttttacagtgacacgttgtttgttctttttaaatcttgatttccattcagcatgtgggacaatgaaatgccatttctaggcaggttgaagattgcaatatgcgtacattctgaattaagagatttaaacaattgtagttaatactgtcatcctgggttacatttcatgtggtcacattccataacccggagcttatgggaaaaatttagggcatctgaagttccctctaaagcacttggtgcccagaaattagcccttggtttgctttggttcagagttgacctctgttagatgttgggtggtggtcactgaaactgttttcggctgtatcctgtttagagaataaaagggctgttttattaatattatagaagccaaggagtacactgctccccacctttaattttccacctgagcttgatctaggttaagcagccactgacgaggtagagggagtggctcaggagggactcaggaggggctgagaagagcctgctctgtgagggcttcttgtgggatttggcaatagtcactgaatttgtcccagaatgaggttgcctgtgcaaatgattaaaagataaaactgggcactgtggctcactcctataatcacagtgctttgggaggcgggagggtcacttgagcccagaagttcgagaccagccagggcaacatagggagaccctgcctctacagataataaaagaaaaattagctgggtgcactcttttgtccccactacttgggaggccaagatgggaggattgcttgagcccacgaggttgaggccgcagtgtactgtgatcatgccactgcactccagcttgagtgacacagtgagaccctgtctcaaaaaaaaaaaaaaaaaattaaaagatcaaatgtaggctgggcatggtggctcatgcctgtcatctcagcactttgggagacccaggtgggcagattgcttgagcccaggagttcaagaccagccatgtgcaacatggtgagacctcatctctacaaaaaatacaaaaattagctgtacttggtggtatgcgcctgtagttccagctactccagaggtggaggacaggactttggggctgcaatgagctgtgatggtgccactgctctccagcctgggcgacatagtgagaccctgcctcaaaaaaaaaaaaaaaaaaaagttcatttgccagtctgagaaatgggagcaaccatcttacttggaaacaaactatatccaggactagggcaacattctgtgcacttaaaaaatcaactatacttgtgtaaaaaagagttatcggacttggctttgacttatttttggtattgtgtttatgtggagttgtaaccaacaaaatcaataaaaaggataagtatattccagaaacctgtatttacgtctccttgcttttccctacaatttgcctgttgcaaatttctaagaacatgggattgttaatgtctctttaaaagatgtcttaaagtaatacaggtaaatttcactgtcaggaaagtctgtgatgattgagatgtagaacagataaatttgtggttaactcagtatgaaaaggattgttaggtataagtgatggctgtgcaagattgctttaagtagctagagggcttcttgagtgattgtccccttctattgggacaactataattggagggaccatttcacctggtatcatttgtggcaagatatttggtgttttgacagaaaaatatattctgtgtgagatagcttgctggatctatgcaggcctaaggtttttatgattgcagcccttaatacaactgtaaaaaaaattttttttttggcctggcatggtggctcatgcctgtaattccagcattttgggaggcccaggcggacggaacatgaggtcaagagattgagaccatcctggccaatatagtgaaaccctgtctcttctaaaaatacaaaaattagctgggcatggtggtgcacacctgtagtcccagctactcgggaggctgaggcgggagaattgcttgaacccaggaggcagaggttgcagtgagttgagattgcaccactgcactgcagcctgtgcgacagagcaagactccgtctcaaaaaaaaaaaaaaagattcgttttaagtgcttccagggataggaagaggaatgacagctgatgaggtttctatatgtgcctggtttctgttttggaagcctcccaaacggaattgggtagtgtttcacttgtacttgtggtgggtgtggggatggaggtaacttacacattgaatgaaaacttcatgtgtcagccagttgatgagagttgccatactattttgtcagcatgtagcaggaagaaaaatcttttaggagcctggaacttgttaatgcttttctatttgttttctaaactaggtggctattgagagttatacagaacatagcaaaataggtaagaatatggcctctggagccagcctacctgtgccattgctagccgtgctaccttagaaaagttacataccctctctgtgcctcattatttttttcttcctctgtgaaatggggtggtgatagaagcctaactcctaaagtctttgtgaggcttgaatgagaatgtatataaggacttagtgctgtgcatggtaaacagtaagtgctcaataaccatttttttaaatcaaaagttttatatgtttatttttatagagaccgggtctctccctgtgttgcccaggctggtcttaaactcctgacctcaagtgatcctcctacctcaacttcccaaagtgctaggattacaggcctgagccattgctcctggccaccgtttttaagtgttcttaagagatttggataggagtgtatggaaagcggacggtggaactgaaaaggacaactgtatgtatagacaactttttgaaaaattgtataaacatacgtgatgggtttttgtatctgtctttgctgttgagggtgaggaggagtagggatcagcatggggacattctatgtaagattactaacaggttacattttgaggtttaaataaatgagaaagtcctcatgaagtctgagatatcaccttgcccacattgcaaaggaggtctctgctttctcagcttaaagtgggaaaaatgctttctgtgggcttaaaatgtgtctcataagtcttccaaatccctgtgtagaaagagtcgcctagtcctgcaccctcagatgttaattcctcttctcaggctttatggacagtgtggtaatggagggaaataggttactcattactgggattcaatttggctccactgatgggaagcaaacagtagttgggtgtttgcttttattttacacttgtgtgacacttgaacacattgatgtcctgtctctatatgttcatggattcagagctacagagcatatgagagagaaccaaacactgatgcacacctcgtaccctctaatcttttcttttttttttttgcagactgaaatcagcatgatatttttctggccaaacaacaaaatgtgattttaaactactcagtttagctatttttggggagtagcaaagtgacacagttggctgctgaattctagcaactaaaaaagaaaaaaatgaaagcatagttcatggaatatgtaacacttccatgtaagaaaataggacaactggtcttatttttgggtctgtgatactgtctttctaagtgagtgaagcagggtgttgtataatgcagtggatatacttttgaggaattcatactagttacaatatacatctaagaggtatttgagttttcatagcattgctgcctcatgaatcctgcagtgcacttaaatcagatctgttcattaattgggaatgatttggataaggggacacagccataagcaattgaccaagcataaaagcatagtccagattagtgaggaaatattactgactttttaaggttgtctcgagaactttttaagaattgtcaaaaggatttatttacaaagcggtggttatttataaatgagttctacctgtttttaaaatgacacttttccagaagcgtttctcttcagtaagtgtggaggcttagctctgtctgtgggtagctaagggtggttacccaacatcttacggaagtggggttgggtggcgctggggctctgggagtttcagatatacatatctcttattcagaatccacaccaaaaccacagagacctgggttgaaattcttagttcattacagcatttaccttgggcaaatgggcctcacccttttaatctataaaatgggaatagtaattataatagcctacgcttaccaagcacatgtgatctatgccccgtgcttgagcattttatatgcttttaatcatccctggaagtatgaaccatgattatttccactgtagggttaggaaactaaagttgaagaaggtaggtccaaggtcaccggggtagcaaggcgcggggagcggtggggggcggtgactgtaatatgtttctctaatcattgctcaggattttttttaaattttatttcagaccatttgctttttgaagagagtatggaaactatttttcctaattgcacaggagggccaattgaaagatctagctttttatgtatttcaccctgttacttttcccatataagcaagtgccatgaacactgggtggaataaaggtgtcttcctgtacttgctacaattaaataagtaagtaatgcaattagtataggattttatttggttacgttgaagagatgacctttcagcaaattactttagcttctgaataagctgataataactgtggatagagtctgaatttgttggtggtgagtttttttttgacactactcctcttccaaattacctaaattgatttgctttgtaatttgagaacttttgtttggggctttgaatatggttactttgtagtaatgcggtatttttactgtcccatgtatatcatctaagtgtgggcagcaggctctgaatcataacttcaggaaaggtctgagggtgttgtgtttggcaagaaatggcttggattctgcatttttcctctggagtttggaactagccatgggagccagccaaaccagctgtgggatcttgggcaagaccctcaatttctttcgggttgtttgcctcacccttcactaaatggcttctaaaatttttttctggaattttagagattgttgattccaggctaggcagtttggaagggttatggtctttttgcagtatgcaagtcagatgcccaggacacactgtgatttgtgaggtgcacttgttgactttttcctgtgagggtttgcttcctaaggcgttgagaacccttccattatcttgctaaccttgctacggattatcctgagggagtagcagacaaggtggtgagtggaacttggttaatggaatgcctataagctatgtttttgtttgtttgtttgttttttaaacatgaaaccttatttcttctggagaccaagttaaaaaaaatatggagatttgctcatgtcaacaaagttatgtgtatagcgtttaaaactatctaatgtgatttatgattggagtggtgggggcagacgtctttgtctaaaatgagaaacgaagctcgttctggatcttgtgtctggaaaggagaaatggagaaaggacaggcatttatttgggttatctggaattctacagatgttcttttggccatactgcatttaaaagaaaaaataaattaaaaattaagaatgcattaaaaatcagtcattttgcattcatgccatcaacaagtttctgggtgcctagagcatgccaggtgctgttctaggcactgggggagacaatggtgaccaaaacagatggaagccccggccctcatgacagcttcccgtgaaagtggggttactcttgaaaaataggaaggtctagcagcctagggcctatgttagtgcttggcaacaacattaacctgaaattaaatagtgctaccccttgggatggggcacacacctgtcccgtagtggttatttacaatactcagctggtccctggaggtgtttgtcacccaagcataggtgattttcctgagggacagattttttctttgggcttgtttggggttttgtattgcctggattggtcatgtataaccatgtgcgtgggcacatgcgctagtgcacacaggtgcattgctggctgatgacatgacttctttcctgtcaatcttgcttatgaagctgaagctcacctctcctggctgtgtcgttttctggctctacaaatggcctgctccttggatatttcacagtcatgtgttgacttccctggttgatttgaatttctgttagcttgttcagttaagacaaaagtgtgttttgaaaaatcgctcatttaagagctggttctcttgatcagtttcttgttatcagatggcccaagaaggggtatgatgtcgggggacaagggggggaaagccagtgactattaatagagtaggatctgagtacattaatattggagatgccatattagtgggtcccttgctacttagttttttttacacaatattgctgccctcctaatttttgcacatggatttccaataaatgatagaaatagtgcacattttaatttttacaacaacaacatgcgaaagcctgaactttgtacaatagagtggctagcttttgactattacagatggaagatttgaggggatgattccttcacccttgttttagtacatgttcattaagtggtcaccgtgatacgcaatacatttacatgaattccccacatgtgattcagagccaaattaggctatgttctttgagggcaggaccacattcctccttgtgctgtgtctttggtgtgtcagtagtggtagtcatgtatgagggctgacagaatgagtagataatgctcttcaaatgattataggatgttttagaagacattgatgtcactgtatgtagtttcaagatatctcatgtttgtatattgtgtcttaagagatacactatccaaggttaatatcttccttaagagaattctgagtatatatattgtcatggtggttgaagtttatctttaaaaagagaagctaaattcgtaccttctgttggctgctaaggtatctgttgctgagaacgggattccattctaattagaggacaaatgtctataggacagcagggttatgttttgatggttgcaatggtagtaaaccttttttttttttcctctcttgtggaataatttaagctaaattctgtgaatctggtggtcattgtatcaaaagtggccttggctcttaggtgattcaggagaaggtagccctcttattagtgctttgttccagaaacagtgaatgaggtatgcagagagcagcagagcttgcctcagctgacagtagagcgcaaaaatgaatgccattgcccagtaatggctttgtgcaggttggactaggagaagggcttgcctgagctgatcatttttgcttggttgacaagtactagttggtcaccagatctactgcccttgatgagacagatgttggctggtgcatcatggtgattctaatgtgcacaggcagaagctaagttttctagaacacattgctagtcaatgcctgccctgttttatccctcttcccaccagttgttttctcttctaaaactagtcattttctcttatttacatgtgtgtaaaggttacgagtggagggtgcagaaaatctcttgacagttttaggcactagcttctcattttcccagtcagtcaatttgggcagaagctgctgaaattatttcatgtgatagaggtttgcatgctagaggtcttagtccattttatgttgctgtaacattatctgagactgggtagtttataaagaaaagaggtttatttagcttacagttttacaggctgggaagttcgagggcacggccctggtgtctggtgagggcttttgtgctgcatcataacatggtggagaaggtggaaggggaagtggacatgtgcaaagagaggcaaaacccaagtgatgccctggcttcgtaacaaccccgctcaagggaactaatccattcccacgagaagtgactcgggcttgccagaatgagaactcagtcactgcctcgagaatggcaccaagccattcgtgagggacccaccctcatgactcagacaacttccactaggctccacttcccagcaccaccatgttgaggatcaaatttcaacaagatttggtgaggacagaccgaaaccatagcagcgcataactttagcgttagagttctttctgaacatattttaggatgtggtttttagaagaacacgtcagttgctagtgaagtttcttaactgaaatgagggagttgctggttcttgaaatttctgctgctccttatgatgcgaagtggaggtaaaattgatttctggggagtctaggggaaatgtaagcactctgaccacataaacaaaggattttgtgaaaataaatcttatatgccttggaacctttaaatggggttgagggaatgagacttgaagacaagtggattctgatgaaagaggccagtggcaaatgtgtatttaaaaaaaaatgcatttttttgcaggtaccagagtgaatcctagctttgtcctttgctaactttggccagttacttaactttattggttttcttacctttaaaatggggataatgagaatttcaaccttcttgagtccttgtgaatattaaatgagatgtgtgtgcaaagcaccagaaaagcattaggcacacagaactttttttttttttttttttttgagatggagtctcgctttgtcacccagactgttcagtggcgcactttcggctcgctgaaacctctgcctcccgggttcaagcagttctccctgcctcagcctcctgagtagctggaattacaggcgcatgccaccacgcccggctaatttttatattttacatagagatgaggtttcaccatgttggcaccatgttggccaggctggtctcgaactcctgaactcaggtgatgtgccttcatcggccttccaaagtgctggagctgatattatagacatgagccactgtgcccggctggcacacaaaattttataaatggtacctgtttttaatagccagtgtttaagattcatgaaacaaaagtgtgcctaaacacgctctcaacgaatgctatgccactgttgtgaagacatgggagagagctggagctgtgacagcagagatcccacagcgaataaagtggcagaaccagaatctgaactggcttttggctgttgtcatgctttcttctgtgcagagcaggagtgtgatgaattaaggctcacagggctaccaggaagaggttttttgtttgtttgtttgtttttttgacagaggtttagcaaagatggcttttaggatttaatttgtcctatatctcccaccttgaagaaaaaggttcatagctactcttcatattctcattgctgaaattatcagcacgagtagggtacacatgccttgctgtatatctttgtgttaatatggggccagtcacaccccctaggtgcatataaacagggacattcagtgaaagtgaacagcatatgtcttcttcctgtccctgtgtgttattttgcagtttttctacagaggaattggaggttggcatttgagccaatggtccccattcccatagctgtggtagatgttgctaattgatcacagagctttttgctactgaagcctgaacgaggtcttagaatcattttcaatagttggtctgggagaggacttttgtgccatctctgtgcctataataaggcagattaaccaaccttcgaaaatagcatgagaaagagaggtgtatccaagtggctactgtattcttggaaataggtgtgctgctacatgggcaatttttaaggtttgcttgtccataaaattgatttgaacttatatttgactcacatttgtttattcagaaaaaaaaatccagtctcttgatggtggttacatcatattttaattggtaagatccactaatggaggtatagggatctaaattcacttgcttatttttccttcaaagcccaggggttttgcatcagattatggcgcttgtaggagtgtttatattccgaagtgacacctttctgaattcttagctatttaagtaagtgttaagaatgggcttggtgacagcagtttttaaaactgtgattgacttattggatcttttccctctgttgtttatacctgacagagtatcttatgtttgttctgaataagttgattgttacctttagggtagcttgtttctcaaaatttgagtggtcctctgatcagtgttatttttgataaggaaattgaagagtaggcatgaaaggtgaaaggaattcatttgcaaagctgacatcagataaattttaggtgcttggtaacataccaagtactcggatgacatcaggtaatcccgtatttgtttcctgtatatgagtttttccacctcaagattccttttgatgttgagcctttgcttaatgaatgtgaaatgtctatagagctctctgttcaatatggtagccaccagccacctgtggctagtaaacacttcaagtatggcatgtctaaattgagatgtgcttcaagtgtaaaatatacaccagatttcaaagacaaatgaaaaaagaatgtgaaatatctcattaaaacttttcattgactgcctattaaaatgatattttagatatattaagtagaaaatgccattgaaattactgtcacttgtttccttttactgtttcatgtgactaccataaaattttaaattacacatgtggctcgcatttgtagctcgcattgtatttttatcggacggcactggtctagagagctctttccaaccttttctcaccttccagaagagcatttcacagctgtaatcccctgtgtgacattgattacctgttttctcttccctaccccttcaaaatgtagggctaagagaaactcttgtaattgatggagaaggttgtctcctagaagatactgcctctgggatattccgggtatgttaggatagcaggttagggtcatttagctttgtgtgcctgtttacccatctgtgaaatgggtttaacagtccctgctctgtgaggttgttggaggagtaaatgaggtaaaccatgtaaggcatttggcacaggccttggcatctagggagcacttgaaaataaaagccgttgttattattttaccagctcatgagtagacatttagcagagttcctggcattgatttctccctctcctagttcctgttggtgctacatcgtgggacctgtgtgggttgcagactggtccctgctacctagaaaatccaggaacaacatctcgcttgagctcctgctcagcaatttgaaaggtagaagggaacttggagattttcagagattgcacacggcctgcggaagcttcttgacagactgatataatccattgcagcaatcagcccctggtgcctgatgaaagagctttataatttcatgtatttcatgaatagccaagctcatttaggatccaagctgtggactccagggtattaccagtggtccaggctttaatacagctgtggatttatttgaccagttggattgggtggtggtctctgcatctgagtagtgtagagacatccaaaatcccctcttgggatgtttggttcctttctccaacagaatgctaaaatgggtggcttttccaagtaaggtgaatattctctactctccagcctgctacttaatttggaaattaaaatgtggagaatgtgagaggcagacaggacatacccatctgagaaaacagttaggtctgcccagaagggcttctagcttggatcccattgagtccatgtgcatccacaggccaaggaaatgggcagtggtggctaatggctagggagggatgcaaaggcacagctgggaaaaccccatccctgtttaattgtttttgaggttcccccgatggaaatacttccttcccagggaatgtttggcagggtggacacatgccctttgtttggtgcaggtgataagaatctgggtttcagtggtaagttcttttacgagggataaacaaggatgttaaagtcttgcagttagtgtgttgaaggggcgctggaggatcctcaggccccatctcgagccttggaaactcaggggagggcttctgagagcagcctgtgagtgtccacatgggagtgggaacaaaaagagttccctgaggactagctaataccctccagcagagccagacttcagagtgactctgaaagagactagtccttcagacctttctgttcacacggaactttggccaagttatctcttgctacgttatcaaggcaaaccctttctagggagtgctgtgatcacctgcatctgcctctagcgacagctccctctccccgtgtcccttcatggggtctgggagttttactcttgtgtagtattttccactgaaagccccaagggaagaacatctccttcaccaggggtgagggagggcatcctgaaattctgctgctattccgacacgtgttttttacaatgtggctaacacaaaccattttttgagcacctactgtgagcatgagctggtaaaataaaataacttcatcttaggggctggacacactttatctgtaattcatccttgcattttccaggtgtaaaagttgaggttttgctaagttaagaaatttgccctgtatcacgtaacttggaaagcggcgaaagccaggcttctgactccaaagccagtgctcttctttctaacagtgtggtgtttctgttcatacatggataccatctacgcgcagcttgtgaattgcacttattggattgaattttgggtactttaagagctgagttctgaaaaggagaaaggccaggtgagcgaggacagaaggctaacttagactgatatcttcattttctggcacttggccactgtagggatacatggagtagggtgaagtctttgtatacacagctgaccctcgaacaacatgggtttgaactgtgtgggtccacttatacatggattttttcttcaataaatgtcttagaagattttttggagatttgtgacaatttttaaaaaatcacacatcaaccatgtagctgagaaatattgaaaaaaataaaaaatatgtcataaatgcataagatgcatgtagatactagtctgttaatgtgttaactgatggtttatgttattagtaaggcttgtggtcaacagtaggctattagtaaagctcctggggagtccagagttgtactctgagccaggcacggtggaacctgtaatcccagctactctggaggctgaggcaggaggattgtcggagcccaggagtttgcagccagtctgggcaacatggcgagaccctatctcaaacaaacaaaattaaaaaacaaacaacagttatactcagattttcgaccgtgcaggagtcaatacccttaacccttgagtcgttcaagggtcaactctattctgattttttttttttttttttgagacggagtcttgctctgtctccaggctggaatgtagtggcgtgatctcagctcactgcaacctctgcctcccaggttcaagagattctcctgcctcagctaatttttgtatttttagtagagacggcgtttcaccatgtgggccaggatggtgtccatctcttgaccttgtgatgtgcccgcctcagcctcctaaagtgctgggattataggcgtgagccaatgcgcccggccatctgatttatggttgataaaatactataatgtattttaaacttagtaagtgttacatatgttaataaaagtaagggaaaaaaacctaactgggtaagtgtgttttattcctgtggctaagaataaaataaaaggacttaacgattattattttcttttggctgcagaaacccttcagtagatcttcttaagttaccttgggtaacaggatataattatacccttggtctgcagagggcatgttagcaaggtactgtgtgatttgtactggtttctggaggttttggagtagttacagggaagtaatgtcttgatggagagaaaatatttgtgtttccctcattggcatgttagtcctagagcatagcagacatgccttcttgctttctgacttttcaaagcctgggcttggtccattctgatgtttttctcaatggtatttttttgtacccatctatagccaaggaagcagccatgtagccagggatgaattttaaacttctctggaggtggatactccttgaataatgaatcccatctcactgtgctctcagttagttctagcctggaggaggcgttgtaaatctagtcgttaattcccccagagaaagttgccagggtttgtttttgtctttctttcatgccacacctgttaattagttccagacactagctaatcagactcaagtgtaaaagctctggggtaagaaggaaggtcaaatcagcggtctttctccacacacaacagaagccctggttttagtagcaaggtttcatggcatccttttccccaccttagttccctgactctgcatttgattcatttctgagtgcaggctgtgcgtagctctggggctttttgtcttctgtggtgttaggtttgtgcttctcagttttagagcgtgtggccacgagaatgtgagagggggagcagggcagagttaatgagagaacccatggttgcttctttttttcttttttttttttttttttatgagacagtctcgctctgtcccccaggctggagcgcagtggcacaatctcggctccctgcaacctctgcttcccaggttcaagtgattctcatgcctcagtctcccaagtagctggaattagaggcacgcgccaccacgcccagctaatttttatatttttagtagagacaggattccaccacgttggccaggctggtctcgaactcctgaccttaagtgatctgctcacctcagcctcccaaaatgctgggattacaggtatgagcctgtacctggcatataggtccttctttatcttggcatgtactgtactcttattttattttgttttgttttatttttatttttatttttttgagacagagtcttgctctaacacccaggctggagtgcagtggcgtgatctcccctcattgcaacctccccctactgggctcaagccatcctcccatctcagcctcccgcataactggtactacagacgtgtaccaccatgcccggctgatttctgtattttttgtagagacagggttttgccatgttgcccaggccggtctcaaactcctggtctcaagtgatccactcgccttggcctctcaaagtgctgggattacagggtgtgagccactgcacctggcccttattttgttttatttattaattttttggtgctgggaatgctgagtatatcatatattcatacatgtcattatatctaaatgataaaaatcacaagagtagcaaccacatgtagccaaagtggaaagctgtccagtacattctttttcgtcctggcacaactctgagattgatgctgtttctctaggggggaatggggacagcatgagatagaacaatttatccgaagtggcgagtgcagccaggacgtagcctgataggaacccagaagcctttgcctatgtttgataagagtggaattcatgttaactttaaccatgtattctgtgtttgttgggatgctgtgaagggaaggatgaccaggctcactcttgggtccagctgttgacttctggaccttcctgtttccaggctgtagatacagaaatgaatgcctgagatgtccagtgggacgttatgatttttaactattagggagtttcctcttgtacattattgcaaggaagataatggattcaagtcaactgttagtggaaacgccatgtgttagcactttgcttcgggttttgggggttcaaaaaatgtgtgcaaaaagtccctaaagcaatgtgttgcagtgtaagactgaagctaataacatgctgaaatactgattcagatcccaagtgttcaggagcgatagaataatgagataagataccttcctacgggtatcctggctggtattttatgtacacaatgaagtgaacacaaagtgaacagaggcaataatgagcatacggtggttgaccatgaggcaaatgggcttattcctagagatgaatcatgcatgtctgggacttggacccatatctgccttgtatcttaggtgcttcctcatggtataaagccattagtgactgctagctggcagatgggccctgcagagatttgagaggcttgggagccaatgttgatacgcatgggagccaatgctggatgcattgactggcccctgaacgcaaggctgaggcattgtccatggagactgagcacagggaagggctcagtggcttccttacagtggtcttgtaaactatagtgtctctgtgcttgctggtcatggactagctttgtgtcctcaggccccagtacatctataagatgggatgatgatccctgtctcatagagctgatggaagaattggatgcggatgtaagtaaagcactggtccctagcaaacacatgattattgttgtttttattgtactgctattatttttgcctgcctagcatctcttttaacattctttgctaataggacctttgctactctttgggtattgatctcctctcctctctgtgttcttgatgggatcatctgctgattaaggagctctgtccacacctttttgagggtggtaaaaaactcaggctgggctcgatacaccttttctccctagaattggcatcttgagccacgtgacatgaagacatcctcatctttctcaattcctgctccctgaagctcagagccactctgatccttgccctttcaaagctggattgtttggttcttggttggtgtctctgagatgtccaaggttctctcaatacattcttttaatgcctacgttaaccaagggttgatttgggtcattttcaatcaaagggcaccaatatcagctggaagtacacagaaggatagataactagatgtgttgagaaggacaggaaccttctcccctgcctgccaaaaataatcctttaatagtggtttcatttctttgtttggtttttcgagttcattcattttgagctttttatcttcgggaatctgaggacttttattttggtgctagggacagcctctctggaggagacatgctgataacacttagccttaactgcttctcttgattttatttgtaaattagaatcctaaggatctgtaaggaaatgagtaaaacttaattgtacaacatttagagcctgaattaaaaataataataaaaagagtctataatggtaagaggccctggaggatgagatgaatgctgagctgtgtgtctgggcatgtattttgtccacacctaatcctttctgtcatgttttaactactccttagagtggaggtcagcagtgtctgattacctccagagttcctctctcttatcgtatcttgtccctcgctccatttccttttctggcattattggacagcaagtgttacaacttaaaatcaatacgaagcaatttcatttgtttataactatgaagatgagcgcttccagcagagcactgtactttcaagtaaagtttaggtttttttttttttttctactttttctgtctggtgcccaaaatgcattaatttttcattgtacgagtttgcttatgttatcccgctttgatctaaggccttgttaccatcatcatctctttaaaactgggattgttggcatctgaatcatttttgtgttttgtaggtccttagtaatcacagctccattgagtttgtccagccctcacacggaatcttattaaaaatgcagcatctctgcctgccccagaccaatggaatcagaatttgtgtttcagcaagatcgccaggtgacttggtacatgttggagtttgaagactgctctgtgtttgaatgggatgtcattctaatctccacgtttcttcataaatttttcactaattattgaagtatagcaaatgttcgttacagaaaataggggaattcagctgggtgtggtggttcacgcctgtaatcccagcactttgggaggctgaggtgggcagattgcttgagctcaggagttccagaccagcctggccaacatggcaaaaccccatctgtattaaaaatacaaaaattagcctggtctgatgtctggcacctgtagtcccagctacttgggaggctgaggcaggaggatcacttgaacctgggaggcagaggtagcagtgagccaagattgcgccactgcactccagcctgggcaacagagggagaccctgtctcaaaaaaaaaaaaaaaaaagaaaaaggaagaaaagaaaataggggaataattcatataggtacgtggaggaaaatggcaatcttctgtaaatcatctgtaacctcaacacgcagtcttatgacttgccatttggtactatagccattgggtgggttgttgattcattctaaaaaacaatattagaggctggtgtggtggctcccacctaaatcccagcactttgggaggctgaggagggcggattgcttgagctcaggtgttggacaccagcctgggcaacatggcaaaaccctgtctctacaaaaaaagtacaaaaattagccaggtgtggttccgtgtgcctatagtcccagctacttgggaggctgaggtgggaggatggcttcagcccaggaggcaaaggttgcagggagctgagatggtgccaccacactccagcctgggcaacagagccagaccgtgtctcaaaagaaaacaatattaggacaatattgcaaatattaaaacatcttttattcagcatgcagtttgattcttaggagatgaatgatgaagatccaagttctgttttggtcagtggcacaaaattcttgaagaaaccttcttttctctcaaacctgtttcatttgttggggacctactgtgtgccaggtgctgctgcctaccttggggaaccgtctagttggtaatcacagtggaatatgaaaagacactgattgggctattggattataacatgaatttttagtgaagcctctggacggttgagacaaaggaaattattaatgcattttgttttctgctttttcttttttattttttgccttgttttgctagtatggattttgatttaattgctactttaattgctttcattgggtgatagattcctctgattgagtagaccttttccatccccaaatatctaggagttgaaacttaaggtcaggaaggacaagttcttcagtgggaaataaaaaaaaaaaaggtggttgtcttggcagcggaagcttgctaattacactgccagttgtagtatctatttatgatggaggcactggggacccaattagcaggtcattttcatgtaaaagtttgggattggactctcgtgtatgaagatgatatggcaaccagtgagcaccttcccagtgcaggggaattgaaggtggttttagatctcattgccttggatctccacaggtcactgataggaaactaaagcttgactgttccttctgttcgtttgcaccaccagtttctaaagttatcttgtctgcagggccaacattactgaaaagttgctacttttgagagcctgacttcctgggaaggaactggtcatagtgatgagaccaatagggttgtgagaatttgcaaactggaaacatagggatgggaaaggcagtgggaccaggagggcattgacacatcccttcggtctggatgtcccatttgtttcggggctgcctcccagaaacaatctacttggcttctttgactaacattgatttggaaatgctagagcatcatcagacagactgggctaccgtgttctctccctgtttattccttatcatttgtagacctcgtgttacccaggtatttctgtgcccagatatatgtgtctgcttccagctctctgcccacatgtaggacacagagcaggtgtgactcacctggtggatgccaagaacaggggagtctgtgatggcccattgcaggggccactgttacgggggatgggggtagtgttctgactcctttttatgttactcacagcagaaattaagggcctatggtgacagtatacacagtcttgatgttagtttatttgtagcactgatggcaaatatctccctacattattgtgtaaaatagaaatgtagaaagcaaacaggcatgctgtgtataaagggcttttaacagggaacttgtagctatcacttataatttgtccttaaattgttaaattttgaaataatttcagatttctagaaaacttacaaaattgtacaaaggatttctgtgtccccttctcaggttctccaaatgttaagttgatcacatttgttttttctctctatgcacatacactctttctgtcagactcattttctctcaaacacacacttttttttttctgagcagtttaagttgcagccgtgatgtttctttacctttaaagacttgaagatgtgtttcctcaaaacagggactttctcttgcttaagtataatacagtcatcaacatcagaaaaccaactcagatacattctgttatgtaattacagaccttattcaaatttagttaattatcccactaatgtcttttatttaataggaaacaataaagtttttcattttatcttattttattttattattttttttaagacagggtcttactttgtcatccaggctggagtccagtggcacaatcatagctcactgcagcctcaaccacctgggctcaagcaatcctcccacctcagcctcttgagtagccaggactacaggtgcacaccaccatgtccagctagtttttaaaatttatatttgtagaggtggccttactgtgttgcccaggctggtctcagactcctgggcttaagtgatccttccatcttggcctcacaaagtgttggaattccaggcatgagccactgcagctgtcccattttttttttttaaactttttttctggtccaggatccaaatccatgatcaccgtgttacattgggttgtcttgtcgctttaaaaagtcttcttaaattaggaactttctctttcatgaccctgccccttcaagagtacagaccacttaattttgtagactctccctcactttggatttgtgtgatgcttcctgtggttagattcaggttattatttgctttttattacagttatgcgtcctgtttctgaaaggaggcatggagagctcgtttcaactctttttgatctggtactcttactgcagggagaaagttttgaacatatacccctattatacatactttcctaaattacagttgtactcttatactgatgttatatctatcataaaacattccagaaatacaaaatttaaggataatttttttttttttatcttgagacagagtcttgccctgttgcccaggccggagtgatgttggctcactgcaacctccacctcttgagttcaggcaattctcatgcctcagcctctggagcagtgatgtgatgttggctcactgcaacctccacctcctgagttcaggcaattctcatgcctcagcctctggagcagctgggactacaggcctgcaccaccactccctgctaattttttgtattgtagtagagacaaggtttcaccatgttgtccaggctggtctcagactcctgagcgcagatagtccgcctgccttgacctcccaaagtgctgggattacaggaatgagccgccgcgcccggccctaggagggataaatattcattaacattcatatatatgaaaaaaatatatacacacacatactcatatatgcatccgtgtatatgtatgcatagatgctctgttgttttcttcaagtagcacagtgctggagacttctgcaacaaacagcagttgtagtcacctctctacagggaggaagaattcatagcatgctaagttgggatttattgatctctccatagcttataggatttcctgtaaaacaggggtcagcaaatcatagcctgggaccacccagtctggcccactgcctattctgtacagctagcaagctaagaatattttgctacatttttaattgttgaaaataattaaaaataatattattttgagacggacataattatatgactttcaaatttcaggtccataagtaaagttttcttgaaatacccatgcccatattttattgaaatagccgtatctgtttttttatgaacagcaccacaatggaagaatgctgtgtagcctgcatgcctaaaatatttattatatggcctgttacagaaaaaggctgccaactcttactctaataccatctcattaaggaaactatcacttgttgaatgatatgttccaggtcctgaacttagcactttgcatatattaatttaatctttgccccaaacccatgagatacaagggtcttctcagatatctgcttctaagatactgtctctgccatagaagtgagaaaactttgaggctcacagaaaaatttcccccagttacacaactggccagtggcagggctaggatttgaaagcagttcttttccattttggttgttggtgactcaaagtcattctgaactttcagaattcaggtggttgatggggtggggtgggggtgtcagtatgcgtagctcaggccactagactggtctgcgtgtcaggatggccttgtccgttgctgtatgcttagcacatggggacacgtggcagctgcttagtgaagagttgtcgggtggatggatgagtggatgggtagatgggtggatggataggtggatagtggacagctggatggatggatagatgatgcctaaactcagcatggaaaatgaaagtcgaatatggatgtgtagtcagggtcagttactagactagatttatagaaaacagccactcacatttggctagagcaagagacccacagtttagggaatctgtggtgagaagttgaggagttaggccagagatgatgctaggagccagagggtttcagactgatgctttccgagacacgtggtaagtggtgactcaggatgacacagctctttggaaatgcctagagcttgtgtccgtgtaccattgggcacaatccttctcaggatggcatcatcttctatttcagaatgagatggatgggccaggagcatggcagcatctactcctggagtaggcattgttggcatttatttttttctttaatcaaaaaaaaaaaaaaaataggctgggtgcggtggctcacgcctgtaatcccagcactttgggaggctgaggtgggcggatcacttgaggtcaggagttcaagacgaccctggccaacatggccaaaccccgtctctattaaaaaatatataaaaattagctggcgtagtggcacgcacctgtaaccacagctacttgggaggctgaggcaggagaatcgcttgaacctgggaggtggagattgtggtgagccaagatcgtgccactgcactccagcctgggcaacagagcaagactccatctcaaaaaaaaaaagtataatacataaatacgtttttttcttagaacatttcaactaaggcttacatctgttgactacttccctcttgtcctgctgccctagagtatgaagagatttgaataggtttacaaaagtatatttatagaaatacatagattatttttacatgaataatatgctgtatttatcattgtattgcttgtttttttcatttggtaatagtttaaaaaatacttgattgttgacccctaatacatttagcatagtctttttagttacagtatagtattctattgttgaaaatatgttgcagaggtgccatatgcagtggctcatgcctgtaatcccagcactttgggatgccagatcactcgaggtcaggagttcaagaccagcctggccaacatgatgaaataccatgtctattaaaaatacaaaaattagccaggtatgatggtgcatgcctgtaatcccagctatttgagaggctgaggtgagagaattgcttgagcctgtgggaagtggagtgaaacctccactgggcaacagagcaagaccctgtcccaaaaaaagaaatgctgcaaatgtaattaggcattctcctgctgatggccattaaggccacttcacagaaaacagtctttatatgtacctccttgtgcacatttgccagtatttgtttagggtcaatacagagatttggaactgttggatcataggataatagaaacgagggtcttggctagccctccccttcttatggtactggatacccgagggcaagattcagtctccattagctggtcctcttagcttttcttcttgtggatgctatttgtttttctttctttttttggagattgagagggcacagggatgagcttgctgtgataattgcaggccaagtttgtatgaatccaggacctcctatctgctgtgtcactgggcctgcaatgggttttcttccctctgttgttaagggacagataagatgtaattgccttaatgctgaattgcctttcagcaggagggaaaagggaccagtggcttctccttctctaggccagtggcatggaaaggagatgaagaaggagtaggaagaggagagggcagtgaggtgtgtagaggaactagagagaatcctgtagacctcaggttttgaacttggtggtggaagcatgatatgctctggcttaaaaatattcactgaagcactatgtatagtggttggggttggggacatgggctttggaactgggtagatggtgacaagggctttggaactggtagatagatacggtgcgattcctgtttctaggcataactagctaagttactcaacctattctgaacttgatttccccaaggatccttaagaattgttcctcaaaggggtagaaggggatgttccagaagaaaacagatgtgaagtgctcctccacacagtggagtgctaattttttttttttttggatggagtttcactcttgttgcccaggctggagtcaacggcatgatctccgtatcaccgcagcctccgcctcctgggttcgagcaattctcctgcctcagcctcccgagcagctgggattacaggccaccatacccagctaattttgtatttttagtagaaacagggtttctccatgttggtcagggtggtctcgaactcccaacctcaggtgatccgcctgcctcagcctcccaaagtgctgggattacaggtgtgagccaccgcgtccagcagtggagtgctaattgttaattctctgctgtatgtcagttcctagttttgtgcggagactgtaaaggataagacgtgttcccgccttcagagcaagtatggcctagaaactgctgtgtaagtcaatcagcatgaatacaatgttggatgagcccaaactgcttggagtttctctcagtaagaggcactgggggaaaaaaggactgaattttccctttctctgaagcttaaactgtgccagggtgaatggatgttgcagcatgcaatttttgtttttatataaagtttagcctaatcaaaatagttgcatattattttcttagtagtcattgtaggaaacaccaattttttcttttctctctctttttctttctttctttctttctttttttttttttttaagaaagggggtgatctgtctagcttgtggactctctcaatattcaccctgtctctgaaaatcaccctcccacctccttgaattctggtgaaggcagtcccacaagtttgtgttccaccggttgaatagccctgttaggaagacatccattttcccccacaagttcccataaaagccgtggggctgacccttactggactcaacttggggcatggccccatccttgacctaagtatggcccgtggggctgtgctgaaggtggttccttagaataaatactgggcaggcaaaaacaatataggtgctgactgggcctagggtattctaggatattctatgtcttactactcagggtatcatgctctggtcagcagcatcaccattacctggaagcttgttggaaatgcagactcatagactcttaggccccactgtgggatctcatggatcagaatctgttcttaacatattcctatgcacattggaatttgagatgtgtgcagtgctggagcaagtcagggaactctggcccatatccatctcttcttcatggcatatccctgtatacacactgggcacctccatctcccaccagggctcacacctttgaaaccctaaagcagtgtgtgtcaagagaggccccaccatgatgaattgcttttagatgttcctatagtttcctttaagaccaggaatcagcatttcctttgttagctaggtaaaaataatgaattggaaaaaaaaaaaaaaaaccaaccacaaaagatggtccaggttttcctcacagttaaaataactggttacatgggtgggaattgctgcataaaggcttaaatctattccttaaaaacaagctgtgtatacagttctccttttcttagctaaacaaaatgaactgggtttcaaaaattggagatgaatgaggttcttataataatcagttgcatttacttatcagctcttgttcctgttctcttcatttcctttcagattgaggcatttttaatgaggagagaagttagaaaagggggtcaggaaaactggaaaaaaaaaaaaaaagaagaaaaagccagaaaaactcttctgctgagctctgtagctgttctcagttctttaaagtgcttgaaaagtaatattttgttgctactaaatctaattaatagctagctggtactcatcaagacctcatttctttcaaccttgaaggcaattggaaagatacacagatctgtgtattatcacagcaaacgaattctcttttttccttaatcacttagagcttggtaaagcaatgtaggcagcagacggacagctgtgttttaaaaaataaaacgcatctcaggatgttcactgtggctcgtaatgaatgtgtattgatttttagaattactttttgaaaaaaatagaattttgaaagcagaatctaaactgtatactaggcatggttcttaacagaatagcctacctgttcctgaatgtttggattgagtgaataagtatttggaagcctgtcctctgcccagcacggactaatcagaatgctgtgggccaaaatgggtttaaacacaaagagaggatgaaaatactcctccgggaggagggcgccgggtggattacaatgcagagccctgcatctctgcctgtgtagggtgcagctgtgggctgttagttacatgggcatttcttccattctgagtggaccaagtgtgaattgacttggtgcctgaggtgcagataggctcaaggaaagtaggtcaggcctgaattgtggctgttagacgttgggagtgcaagcagaagagaagacagtgattacaaatactgcctatttagaggacaagagcaacttcggagagttggaggagcaccccccatctgcataccacctcctccatccaatcagttatttctgcggaagcacacccaggactgatgatgttttgtgtgttgttaggtagactgttactcatttggcagatatttattaggtgtgtactttgtgccaggtcctttgtttgaacctcaaacctgccttgggttggttgtgccagtggcgccgacatccatcactactttgcatgttggtaatttatatactacactaataatctggcagtcctgctttcaagcctgactcttatcaataaagcgtaactgagaaatgcgcacagtgtgtttggggaaatagtttacaggaagaaacacgatgttacaataaaattggcctgatctaagcatagctaaagtctgaaattgacagggaattgttacaattagtgcactgattttttttttcttttaaccattccttgtctgttgcgggaaaatgaaagtttttcctctccggatgaaaagcgagaaaactgatctgtttatttacagatgtttgtcattttgtcaaaacacacagatgacggtctacgttctttggtttctgtctggacatgctgcatgtgtctgtataatgagagcagcaataatctcccacttcccctggacgaaaccgaacaagatgtgtttgtttttttttttttcctttgtactctgaatgtgggaacttaattgtctgtgttcgctggtgaactatttgtttctatgctaggtgctagtacatattaacgttgtacttcctttgcagaaggggaaaaaatctgattatatagtgttacgtagctgctcaaagttaattgaaattgactgaagtaagactctggggactctaagatgtctcttcttacagctgggaatgtgtcctcaaagtttgtatattctccaagatgggtcagcagtgttgcaattccaagaaagggactagatgtcagaacttgggcaaaggaggcatttcctgtgactgcttgagagaaggtggtagagaatttcattttggtaactttagtagtttggccctaggccttgacccttccttctcctaattgaaaagacattatattcataggctagtaggctggaataccatttatatacttgacacagcatctgtcaagctcagtgggactgtctaatattcacatgtaaaactgggttggggtcttggagtctttattggttttataggtttaggtaactgattcatatagtagctaagaaatctatctagtgttcactccaagggaaaagattagataatttatatgttgtatttctttttatacttctgtttctctcagtaaacaaagtgtttaaagaataagcagctatagcctgaagtgttagtaccattgtgtttttttagcaagtcttggaaaaactgaaggtattcttgaaaagaaagctccaccaccccatgtaatttatacatagcctacgttcaaggcaaaaatccatttaggcagaaggacaattcattttgaaaacaaattgcacaatctccatttgtatttggttttagaaatggaaaatgtactcttcttaagtcagttttcagtaacttttggccaaaggatattttgggacaaagagtattcttgaaaagttgcttatctttgaaatgcttaggttaacgtagaaattttatcgttgtcaccccctcattcctgaaccccacagtctcaacttgttttccattgtaagaagacagtggatatgtacatttagcttaaattaagtggaattgtaccatagtttcacattacttttactgtgtgagtatgagacaacatacatattcatttataaaaacaacaggaatttttgcaagagaaaaacagatttcactagtggttttcaaaacacagaatctgtttcaattcggatggatttgttgttgttgttgaagcacagtatatgaaacacgtagcatgacctctttatttgacaaataactggggcagtgtagggcaagacacttgctatctgaggctttaaagcaagctatttgttttttatctagtgtaacacttctctcattcctgatgaggaaactgagattcagaaagtccgagacccattcagagtcactgtgagttggtgggagaagtgagtttgaacccaggtctcctctttgctagtttgtaattgtttcctttttcacaagtagaaaagacaatgaacaaaaatgagaattgcatgaatatgagtttagagtctcaattagtttattattattattattattatgtttactcttattccctagtgagacagaattactttttagaagtgaataattgtctcaaggtttttatgcagcttaacctatattttagtaacatatgtcttagtccattttgtgctgttataacagaatacctaagactaggtaatttatagtgaagagaaatttattagtgcaggcttttggaggctgggaagtccaagattaaggggccagcgtgtggtgagggtcttctcgctgtgtcatccctttgtggaaaggcaaagagaaggcgaggtagggaaggggcaaactagtccttttataaggaacttactctcccagtaacaaacccactccctccttaatgacattaatccattcatgagggcagtgctcccatgacccaaacacttcccattatgctccacccaacactgctgaattggggagcaggtttccagcacatgacctttgggcgacagattcagaccatactgtattatccgccctccatatctgctgagtattgattctaggactccctgtggataccaaaatttgcagatgctcaagtcccttatcgtcggccctctagatccttggattttgatctgctgttgactgaattcaaggatgtggaacctgctgctgttagggaggcctgactgcatatttgatggaaataaatggtatagaacatttaatgttgaattttactttccctggtctattagtttagaataccaccagctgcccacattatctagggcatgtaagtccatttgttaaagggtctgatttaatctttttaccatgtaggatttggttttaggtcattgtcctgaacttaataaattggtttggatttcctgtgtgttgtgggcttatgtcatctttaatttaatctattaaaatggataaatctgcaaggatgttgaagaccctgtatttctttgacagatttctgtgagccactgaatcactttatttttgctaaatattgatatttatgtgaaaatggatagagtgatttgtgttagttgtcattagggacattttactaataagaaatttatcctcttaaagcattttggagccattgtcatggagtataaaacaaagctaaacattattctagcatgaaaaatccacttaaagggtacagtagttgccacagtttgtttttctttaccaaccaagatacggctttgaaactgaggggcactggctatgggaaggaaccgctggcactgaatgaatagaaattttgaacatgcttgttttgaaactcggctacctctgttcagggttgaccggtctcagtggtaacaagctaaaagtgaaataatgcctttttgccaacaccatcttgattcttcttgtatggactgcttgagccaatgtaacacataatgtagagcaaaacaaggaatcgataaagccattaagcagctcactgtctggctaggaatgttgatgaatgggtccgcatttccccttgggtgtttttattcaccacgggaagaaaaggagtgggccaagaaagtagaaaaattgagaagaacggcttttcttgcttcagtgaggcagcgcagctagtgtctgtccttttaccctggagattccttttcttatctctgaactaggatgtgaggttgagcgtcctgtgctgtccccgtcctgtctcttattttggggctttattacttgatgatagagtgaagagctataagacacgctcattaaactcggccatcagttaaggtgtgactccgcttagagtcggggaccagtgcccaagagatgtgatgccattgagtggggccacaagagaagatgtgagcttggatggtatattcgtttgctagggcccctgtaacaaagtacaacagcattacaacagtctgggtggctttaacaatggcaatgtattgtttcatagttttggagggcagaaatctgagagtgtaggcagagttggttccttctcagggtcgtgagggagaatctgttccgtgccctcccctagcttctggtggtcttttgacattctttggcccgcggaagcaccataccgacgtaattccttcatgttcacctggtgttctccctggctgtgtgtgtctgtgtccaagtttctccttgctgtaaggataccagttgtactggaataaggcccaccctaatgacttcatcttaattaatgatatctgcagtgacccaatttcaattcaacacatacagatggataggaagatagctagttttgtgtctctaaaatcttagttaagagtggctgcagtcaagcaacctcagtcaagcaacctacagatttggaattagcacctactgtgcattaaaccattaattaattaattaactaatgatagtcttgccctgtcgcccaggctggagtgcagtgcaatgactcgatttcagctcactgcaacctccgcctcccaggttcaagcgattctcctgcctcagtttcccaagtagctggcattataggcacaccaccacgcctggctaatttttgtatgtttagtagagacaggatttcacaatgttggccagactggtctcgaactcctgacatcaagtgatgtacctgccttggcttcccaaagtgttgagattacaggcatgacccattgtgcttggccattgaaacttttttctaggtgctttcacatatcctgcattcttttttctttgtttgttagtttgagacagggtctagctctgtcgtccaggctgaagtgcagaggtatgatctcggttcactgcaatctccatttcctgggctcaagtggtcctcccaacttaggttcccaagtagcggggactacaggtgcacaccaccatgcctccctaattttttttttttgtagtagagacggggttttgctatgtcacccaggctggtcttgaactcctggactgaagtgatctgcacgccttggcctcccaaagtgctaggataatcggcatgaaccaccgcacctggctgatcctgcattcttcaccacagcaaacaaatgcattcatgtttctgaaagttgtaaaggctttataatagaatagaatagaatggctgggcagggtggcccacgcctgtaatctcagcactttgggaagctgaggcaggctgatcacttgaggccaggagtttgagaccagcctggccaacttggcaaaaccccatctctaccaaaaaatacaaaaattagccaggtgtggtggtgtacacctgtagtcccagctaatcaagaggctgagacaggagaatcacttgagcccaggaggcagaggttgcagtgagccaagagcaagccactatactccagcctgggcgacagagtgagacattgtctcaaaaaaaaaaaaaaatatatatatatatatatatgtgtgtgtgtgtgtgtgtgtgtgtaaaatagaatgaactttatagacaagcaggcacactttagaatcttctactcatcttttattcctttctgggtactgaaaagcatagtaattctaattcccagtcacctgcatgaagactttgatttcagtcaagctcagtgggcagccaatgttgacattacacaaaacatgtactgtatcattacgtaagacatgaactgtactttttgagtgattcacgggatttgtcaggggtaattttgactctggatgaaaccttttactttgtcttttgaacttcttactaaagtttgatgatgatgtggttttggttcttttgttttttgtttttgttttttgagacaaggtcttgttctgtcacccaggctggagtgcagcggcacaatgacagcccactgcagccttaatctctcaggctcaagcgatcctcccacttcagcctcctaagtagctgggaccataggtgtgcactaccatgcctggctcatttttaatttttttgtggagatagagttttcccagtgttgccgaggctggtctcaaactcctaagctcaagcagtcctgctacctcggtgtcccaaagtgctgggattacaggcttgagccactgcaccaggcctgtttttgttttttaaaatgtcttaaagttgggtattttcaagcctgcctttagaagtggaacctgttttgcaaataaaatcttacttcaaatctcaatgtataaaacagatttttaaaaagagcttttttgggccagatgtggtggctcacgcctgtgaccccagcactctgggaggtcgaggcgggcagatcacttgaggtcgggagttcgagaccagcctggcttacatgacataaccctgtctctaccaaaaaatagaaaaattagccagacgtgatggcacacgcctgtagtcccacctccttgggaggctgaggtgggagaatcacttgaaccctgaaggcggaggttgcagtgagctgagattgcaccacggcactccagcctgggtgacagacggggactctgtctcaaaaagcaaaacagagcaaaacaaaacaaaaggagcttttctgaatcagggtatcggcttctgttcgatgcctgcctcccacctttctgagttgagttaactcatccagaacacactttgggaagacactgaaacactgtagaatgtgggcatgttggcctctgctatttgatgtgagttttattatctagaggaaaattgcaacattatatcctttgggtaatctccagtatttatgggctcaaatcagtgttgatggtgtattcttttgttcacttattcaacaaaaacaaaaacgatgttggaggtcaaaggatcagtgagtctcttccataagagttcttggtttctctttatccatccatctcatatttattgagtacctcctatgtgccataccttattttaggtatttggaaaagtgacaaaaccaacaaataatatcagcctttatggagcttgtattttagtggggggaaacagactaacatgatagaaggtgacatgtgtcagtaaaaaggaaagaagaatcatggaaatcaggaattgggtgggagttgggtggattgccacctatcttaaatagacctcattggaagaagttaatatttgagcagaaatgtgaaggaggtaaagttaaaagttaggagcagagggaacatactactcactctcatgcgtggtttcatttgaaccttacaacaacgctgttagagcgttgctgtcaaccttcagccaacactgacgttgtccaggatgaagtgattaggaaacagtggtggaattcccagcctgtgggtggctttatgcaagatgcagctggctaattggacaaatgtatctatgtgactgtgttaatggaagccttcttgggcttctgttcaggccttcctagctttttttttttaaatttttaatttctgtgggtacttctagccttttggctggctgtcttagtcaatagggttgagactgtacctgtcttgctcacttgggtttccacagtgtctcgttcatagcttacatgtgttgattaaacaagaaggaaaaaatatgccacctgcccccttgtaattaaaagagaagttcaaacatccaacccagtgtacacaatccagagggaaatgaaatcagcatcctcacggtgggaccagtcaagtgtccagctacctcacacacgtgggcttctaattttctctgtgggtcacactaaatagtccattgttcatcaaggagagaggaaattgatttcaaattacgcctgtattggttaaaaactgaactgccatgaatgctttatgggatcagggagaagataggcccagggttttagctgcagtaaaacctgcttaattaaccagacactgtctattactatcttgacagtcagcaggaccccctcttcggcacaggggcttagttttgcagcccatgcttgcagggccaggcttggtttagacctataagggtggagggtttgggcttctcatctgttgtctacttccttccctgggtcactgcttgtgccggctggtgagaactgattgttacattttcaggaattttgagagccaattattaaacacagtcttttaaaacatagacttatgtaaacttacaattaaattacatttaagaagtgacaaatatctcaagctcaacacttcctaatgattttcctgcattttactctgatctgtgctccggaggttgtatctgtggtgtgtgtggtagtattactgtataatggtttgctactgcacatctttcctccttcacatttagtgatgttacttcattttggtgctttgaaatgggtcatcatgggaatatttataccatggaaatcagcaaacactataaatcagccaccctgctggaactggatggtaagtgtttaccaaaccaccactgacttggggcatcctctgagttccttagggctactgataaagtttggatgtttgtccctacccaacactcatgttgaattgtaattcagcatgctggaggtggggcctggtgggaggagtttggataataggggcggagcctttgtggtttggtgctgtctatgccatagtgagttcctatgagatctggtcatttaaaattgtgtggcatccctcacctacccccacttgcttctgctttgccttctgccatgattgaaagctccttgaggcttcaccggaagccaagtagatgccagcactgtgcttccagtatagcctgaaaaactgtgagctcttttctttataaattacccagtctcaggtatttctttatagcaatgcaatcatggcctaatatagctaccattacaaaatgctacaaactggtgagttaaaaaagaaggaaatttattgcctcacagttgtggagttcagatggtccaaaatcaaggtgttggcaaggttgctttcattttggaggctctgagggagaatctgtcccttgccactttgtagcttctggtccttgctggcaatccttggcattccttgccttgcagatgtggctccaatctctgcctccatcttcacatggcactctacctgtgtctgtgttttcacatgctcatcctaccatcagtgtctctctccccttactataaggacaccagtcatattggattaagggctcattctactccaatatgacttcaccttaaccagttatatccacagtgaccctatttccaaatcatgtcacattctgaggtactgggcattagaactttagcatggctgggcacggttttattgacatatatttgtcaacatatgcctgtaaacccagctcatgcctgtaatcccagcactttgggaggccgaggtggcagatcgcttgaggctaggagtacaagacctgtctggccaacatggcaaaaccttgtctctactaaaaatacaaaaattagctgggcatagtggtgggcacctgtattcccaggtactcgggaggctgaggcaggagaatcacttggacctgggaggcggaggttgcagtgagcagagattgcaccactgcactccaacctaggtgacagggtgagactccgtctcaaaaaaataaaataaaaaatagaactttaacatatcttgttctttgatggtgacgggaggttgtaataattcaacttttaacttctgccagtggttttaagttgcctattgtgacatctggcctgtaggagcccagctcagatcatacaaataaacattaaaggcccatatgtctaagaactttagtggcttactatgcatcaggtattattctttgtcacatcagttctcctttaaccctctcaaccagcctgtaatgtaagtaccattttttccatttaccaaataaggaatttggtaaactgagtaagctggaataattgtcctggctaacaagtagcatacttggtagttgaacgcaggtctgtgaccttttgtattgtaacactgccattcatcagcttgcttgccatgagtttttttttccccctagaaccctattagctgtgccacggccacatggagggttcattgtggcaaagtaggagagaaggagtatctgtttttcaataaaactccttgtagattcagggtccaggcagggtgccctgatatatattacctgatttgatcttcatgacaactttacaagtcactcggtctgctagatgagaaaatggaactggaggggaataaaatgaactttgtacacagagctggtaaaggggacaactgacgaggtagcccaggtctcttcggacctaaaggcctttcttgttggatcatgccacactctgtccttcagcacatccaacatctgataaactggcatctcccattcgctatccttctctttgctggaggatttagtcacgcgtctgtttattttctcattcagttagttaagtactgagagaaccctaacgatgtgctgaggactgtgttaggggtgggttgtgacttgtaaataaacatttattttaattaatttttttcttttttattcttttgatacagagtcttgctctgtcacccaggctggagtgcactggcatgatctcgactcactgcaacctctgcctcccaggttcaagtgattctcctgcctcagcctcctgagtagctgggattacaggtgcacaccaccacacccagctaatttttgtgtttttaatagagacggggttttgccatgttgactgggctggtctcaaactctggacctcaggggatctgtccactttggcctcccaaagtgctaggattacaggtgtgagccaccacaccaagccaatttttttatttttttgttttttttatttttagaaagagtcttgctccgtcacctagactgaagtgcagtgctgtgatcatagcttactgctgccttgaactcctggcctcaagtgattctttcacctctgcctcccaagtagctgggactacgggcacacaccaccatgcttggctaagttttctagttttatgtttgtagagatggtgtcttgctacgttgcccaggctggtcttgaactcctggccttaagcaatcctcctgcctcacttctcaaagcagtgggactacagatgtgagtcaccacacccagcctgacttgtgaataaatatgaacagcttggctgccagaactagaaggctttggcatctcccactgccatgctgccttaaaagggcatgaggtcccacctctgtcttttccattttcctggttggtggcacccctcaccccatgtggtgtatccattttctattgctgtataacaaattaccataaactcagcaatctaaaacaacacacatttattatcttgcggtttccatgggtcatgagtctgggcattagctgggtcctctgctcaggctgaaattagggtgccagccagggctgtgatctcatcggaggctcattctctcccaggcttgctggttgttagcagaacgtagcgcttcatgtttgtaggactgaggcctcagctcctgaaggatgcctgcctttgcctgcgacgtggctgtctccacaatgtggatgtttgcttctccaaggccaacaaggtggtgggggtgcggggtgtcagggtgtctctgctatttgtagtctcttttaaaagactcacctgattaggtcaggcccacttagaataaattctcttcattaaattaaagtcagctgatcagggccattgatatacatctgcaatatccctaactcctgcggagctatatacagagcttatttctaaggagagaagttcttctggtgtcccaatgtcagtccatgtatgttgttataacaaaatatctgcaaccaggtaacttataaagaagagaaattaattttcttacacttctggaggctgggaagcccaggatcaaggcactggaggcattccttgtctggcaagggctacatcctccagaggggaggaacactgccctcaacatggtggaaggaagaaaggcagctttcctggaggcgctgtgggtcctcttttataagggccttaattttattcaccagggaggagccctcagggcctcatcacctcttaagggccctaactattattactatcacattggcaacacctggattttggagggcaggcactctaaccatagcaccagatatcatgccttactcttaatgatcaagatttgggtcacgttcagctggaccaataactgaacaggctcagatgacgtccccacctacgtgatagaagtgaggatgaaagcccccacttcagcctcagggaatagcattgtcttaggaaagaggactctctgccaagaggtgagagaaggagctttgggcaggtaaggataacacatgcccactttggaacttagagtgaccagcacatcctacacggatcaacttggttatcattctaggggtctagaattggtattctgtgtacctccttccttgacactgtagtggtatggacagccacctgtgaaataaagctgtgggtacagagcagtccctgttaggttttcattttggtgtgaatcctctgtctccttgacatgagtatcctttaaatacttagaatattgtcccgagaaaatgccatatgaattcagaaatcggatcaaactgtgttctttgggatccattaaaactgaaatgcctggggccaaaacacttaccagatgcatcaaacactactgtcagtctgagactgctcagccacatcgctaccgctctcatttcataggagttttctttcccacagaaaggcagctcgacaaactcttttaaaccttacttttttttggttttggtagtggtagagggaaggtctgagcaaagataacagagtggctacaaacttaattattaatctgactcttctctcctgcttctctttagaagtgacattctctgtggagaggccaggagggggaagttgtagcattcaggttttatcagtttgagggcccactttcttcagtgggtctctgtgatggctgaaacgggttgcaaataaataaatgccatgtgggctcaggaagctaaagtgaaagagtgaggtgcagagccacagcgaggggctggactgtggagaactggacgcgacttgcctcttctccaggcctggcggggttgggcttggggtgaggattaccctgttggaatttgagccagcattgttagatcattctaatatttccagagaaactagacatcttaaactttacctaattacttccaatttttatttttttttaatgaattcagcttttattactgcatgagggctgaaataattgtcttttggctagacttgtcctgtgggtggccagttttgatctctggtccgcaacttgccagggcagaaggcttatcggggatgctgtttgatgccttgtcagcatccatttctatcttccttcttcgtacagagcctcggttttgtacagatatctgtcctcctccataaagctgagcagctagggagaagctgagcagcaagggagaagctgagccactagggagaagcccagcagttgggtagaagccagaccctagctccaggttggctatatttggttcacagccatcattaaggattggttcaggagcaactatgtgatctcaccacgtgtgtaatggaattgggaggatgtgtgtgctgggcccttccgtggagagctgcatctttccttgaagcctgggaatctgtattctgtttgctgtgggtgctgccaggatgtgccacccacaactgcatgtggcagccatcctgctgccagcctgagggtacaaggttgaggagagctgacctggaagggaagggaagcacctggattcttgttcgacttctttgagctgctcaatcagctggctctggaagcctgcctttcctttggactcccatttgtgtgaaacaataaatgttttattgtttaaggcagcatgagtcggcctgggaagcagactaggagagggacctcagtccatttctagacttcatgaactattggtgataaaggatgctttccctgatgccaggctaagctgccactaattcagggctagatgatggaaggatttcatcgtctttacgctgagcccttgctattgtccctttaggggattatccaagataatactccatctgaggtctgggctcagtggggaagagcataatcacttacatctgccatgggggctcagcatgaggagtggcaggagtaccagtgtttgccctcgatgtgtgaggttgggtcagcctgaacatgatacggaagcctttggtctctagagagggttagatatagattgatactaaactatgaccttttccatttatgaaaattactcttcaggacgatataccttcatcaaggtataggaagttattggacttcccttaggccgtgtccccttatctgtaaaattgggctaaccatccctctataccttgctgtgtgggtcgaatgaagttatgtatgtaaagtgatgagcacagtgcctttctcattttaattttcatgttttcctgttccatttctacgtatcatcttggctaccaagtcagaaacctagaaagccttttggggaactttatatatgttgtgctgtttgctgatttttctggtggagttttctgagaagggagcttcgcctttcaaggaagagctgagttgtatgtggtatcatccacagtttcaggttcttaagagtagtacaaacagaaaaggtggttcaccaacaactacaagcactctacatctcttatcattccagatgtttctttctttttttaaaataagaaataagactgggtgtggtggctcatgcctgtaatccttgcacttcgtgaggccgagttgggtggattgcttgagcccaagagtttgagactagcctgggcaatacggcaaaaccgccctctacacaaaataccaaaaaaattagctgggtgtggtggcgtgcacctgtagtcctagctacttgggaggccaaggtgggaggatcacttgagtctaggaagcccaggttgcggtgactgcactctagcctgggcaacagagtgagatcctatctcaaaataaataaataaaatagcattgcattttgttttcttatttctatcaatttacacagattattctttccaacttttttccaacaagttaacaattaaagacagcccttctattaataatgcagataacttttgattatatacaaattattttcacactttaaaatgtttttatttgtatctagtatggagaggcagtgaggcatgtgatgtaaggagtatgaactccgataccacactgcctgggtttgaatcccagcatggctacctagtggtaaatcacttaatcttgttgtgcctcagtttcctaatctgtaaaatgagagcaattatagtacaactttgtagggatgtgaggattaacagtttaatgcatttaatacatttaatgtgcttggaatagtgcctggcgcagtctaagtgctgtgtgttcacttctatgcatagtcaaaaataacagtaataaaatctgcagtactactactggctctatcatcagtctttgctaagagattttgcaagacccaaatcatttggtagatgtattgtcattgtctcttagattacaagtgatttactgctgaatataaaaaaattgcccaggcaggtaagcttaggaaaaggagcctccatggggcaaagatgctgggctatagccagcagtcttcgtagcagatggataaagagattatatcgtatgtttgcctacatagatttggctgtacttagggtgatagtaagaacaggaactgaatgttacttaagagctcaacactaatgcatatgcagcatttaataagacaaatattcctctgttaagtgaccattcctttcacaggtaggtagttattttcgtttcactcacttgagtattacttattctctcattgccttcctgcctccctgcctccctccctccctccctccctacctccctccctctctctctccatctctctttctctatctctctctttgtttttctttctttcttctcctgttgcccaggctggagtgcaattgcactatcttggctcactgcactgtctaccttctgggttcaagtgattctcctgcctcagcctcccaagtagctgtcactacatgtgtgtgccaccatacccagctcattttaaaactatttttagtagagatggagctttgccatgttggccaggctggtcctgaacgcaagtgatcctcctgtcttggcctcccaaagtgctgggattacaggcatgagccaccgagtccggtgtattctttctttttctaaacggcaaaagcaagtttttgaacagagatcctaatcatcctgtaatagtttaaaagtatgagacttagagccagtaaaacgtgggcttgagctctgaaggtatcatataccgctgtgactttatcagaatgttattcagcttcttgtgggttcagtctccttacctggaataaggtgaataaccatccctcagaaccttgctgtgtggatcaaatggaaagatgtacacaaagtgacaagcacagtgcctttctcatcattttaattttcatttttttcccactcaatgttaactaccatcttgactggtaagtaaaaaaaacttgaatgcttttttggggactttatgtatgttgtgccatttactgatttttctagtagactttttggagaagggagcctgtttagaaggaaaagagcgatttttcttgcattagtaagtacatttttctagtgggccttcagtttatttggagctgctttccccaaatttgtgggtcaattaaggcaggggttggcgaacattttctgtaaagagcccaatagacattttcaactttgcaggccatatgcctcagttggacatactcactgcgttgtagtgcagaagtagccacagacagtacatcaatgaatgggtatggtagtgttccaataaaactttatttatagactctgaagttgaatttcatatccttttcatgtgtcaggaaatattcttttgacttttaaaaaactatttaaaaatataaaaatccttctttacatgaggactattcaaaaggaagcagcaggtcagagtttgttaacccctgctgtaagggttttttgttttatttttgagatggagtcctgctccattgcccaggctggagtgcagtggcactatctcggctcactgcaacctccgcctcccgggttcaaggaattctcctgtctcagcctcccgagtggctgggacaacaggcgcctgccaccatgactgggtaatttttgtatttttggtagagacagggtttcaccttgttggtcaggctggtcttgaactcctgacctcaggtgatccacctgccttggcctaatcccaaagtgctgggattacaggtgtgagctaccacgcctggccactgtaaggcttttgataagccctgttgcaatctgtgcagttgagaaggctctcatttaaagaggttctctggtgagcttcttggaatgcgaagcatctttctgtaacctttgtcgtgactctacaattccatccagttgagcaactgttctcttggatgacctttgcctaaagtgagatgcacatgtgcctccagttcagttgtaggtagttctcggcagtactgcatgtggcctgtttccagttagaaatgtcaacactgtgagcccaggtaggtgctgggcacgaattgcctgatggactctctgagaagctgttaacttctccactgcttttgaaaggatcttcacctttatgcattctctagcctattttgttcctctgtttttttcccccgtcttctctacattaaaggtgcattagtgtattctcagtgcaacactttagagttcttggaatgggcagagagcagttatgtcccataatggcaggataatcaatggaaagagatagattgccaggttgtaaatcatgtgagagaatttgatgatatcagcttcgggggaatgggatcctattactcgttctgaattctctggttcctggaattaatttgtgtgtgtgtgtgtgtgtgtgtgtgtgtgcgcacttgtaatcttttggtagaacagcctttgttgtgaaccagaggatgacaaaggacaggtcagcttgtctcaatctctccctccattccttgctgtctgtgctcaccttcgacgagaaatgctttccataaagccaccaatagcgcagcagagtggcttacgcttagactgtcagagtcaaaagaacatttatttctccatattcaagggaaatcacaccctttagactaggacactcaaaagcctagtagaatcctagcaaatgcatttgctggcaatagaaagcaaagggctttttctatttttaagaggaataaactgtgccttttactttctgacttaatgcagagagatgaaaatatgctaaaatcatgttttttttaaaggcatagaccagagacattttggaagcttttcatctagcaaagccagcgttcctttaagcaaagcatcaggattgcttcaatatttaggtattaatattcccttgtggctcaatcagctctttgaagatgaatttctcagcactgctgtcacaattaaagaaagacatgcaggggtgaaagggaatttgtgtgtttcttagattggaaggatgtgttgagtcaaatgaacattctctcaaggttaaattatctatttaaaacccacccaattacagtgccaggtacaatctttgatgagattcagggaaaacaaattaatctgtgtgggagagattctctttgtatgaaggcaagctatgaaatcagaatgaactgggcattgtttgttaagggggaaatggttatataaattgaagatggtgtagtctcaaaaaccatgatccattattaggttactgaagacctcctaatagaagagggtagaggtggtttattacagttgtgcttttgtattttgttgaaagaattgtgaggtgaccacaacacaaaaccatgagcaatatactgtgacctctgtgtgcggagactaatccaaggaatttagagtaatctcagggcatggctttctagaatgatcctcacatcctgttggtttcacctcccaaataaatcttgaatctccctgagcagtgctctctaaatttactgctattgacttggtgagctaccatcctccctgggttaaaatatggtggtagccctctaagtgatcttcctccttttagaaacatcttcctagtacagatgaaaaaatccaaactctcacccatgggcctgcctccgcctctcacctcttcgcctgttgttcctcactcactcactcactagctccagccttcatggctgggatggttcagcaggcctggctccattgtgcctccccatccttctgttagttgcttggggttgccacaatggcagagtaattaagtatagtctctggagtcaaactggtagattccaatcctggctgtgctactaaccaaccctatgaccttgagtgagttactaaaacctttctgtgtcccagtttcctcatctttaagttgggtataataataatttgactttaataatacctttttttttttttttttgagacaggatctttcccaggctggagtgcagtggcgtgatctcggctcactgcaacctctgcttctggggctcaagtgatcctgccacctcagcttcccaagtagttgggaccacaggtgtgcaccaccacgcccagctaatttttttggtgtattttatgagatggggttttagcatgctgctcaggctggtcttgaactcctggattcaagcaatccacccgctttggcctcccaaagtgctgggattacaggcgtgagccactgtgcccagcctactttaataatacttaataattctaattaggtttttgttgaggaatgaatgaattaaaatatagaaggaattttagaccactgctttgagctcagtagcactgtatagattgtggcacagttttgttataaaattagcatcctcattattatgtctgccctttggatttgtatgtggcagctccttctcttgtacatctcagctctagtgtcttctttcagagtgactttcccacccagcttctgaaagaacctaccgcttccaaacacaccatgcgctccacccgttatagttttaaaaagatggaaaaaattgtaacaacataaaagaacttttcctcgctgaactacttggattcattgccagcctggcaccctgtcccctctggacacttgaatgtgtatttcctacaaacaagaacagtcgtgtatcacaatacatccatcagtattgtgaaattaactttataccacactactgtctaatcctcagaactcattcaaatatgccctaattgtcccaatgacagaaggaaccatttagaatcacgtgtctgttgttagtctctttcaggtctggaacagtttctcggaatttccttggcctctatgacctcgatacttttgaaggtaacacaccagttgtttagctagactgtcactcagttttggtttgtctgaggtttcctcgtgattacgttcaggttatgcgttgggacagaaacaccagcggagtggtgctctgggcctttcaatcctatcaggtgatttgatttgtcccattgctggtggtgttaactttgatcacttgataaggcagcatctgccaggcttccccacttaaacttattcttctttttccctttgtaataagtgtgttttgagcaggtactttgagactgctttccataaactttcaacttactctttatttgacttaatccataaatcctcatcagtttggatgatggatttttattttatttgggttatagtctgttaccatcattattttgatgctcagatctctccacatttagatagtgggagttcttgccagctggttcctgtgtccttttgacatgtccccatcattatttgagtaattccttactgtctagaacaagaagttccaggttcatcttgtactctgccggccctggctctggatttggccaagaagctgaggagccaaagagctctgatttcttttagaggagactagtatttatttacttatttgtttgtttgtttgtttgagatggagtctcgctctgttcccaggctggagtgcagtggcacaatctcggctcactgcaacctccgccttctgggttcaagcaattctcccgcctcagcctcccaagtagctggaattatagtcatgtgccaccatgccaggctaatttttgtatctttagtagagatgggggtttcaccatgttggctaccttggtcttgaactcctgccctcaggtcatctgcccaccttggcctcccaaagtgctgggattacaggcgcgagccaccatgcccggctgagaatggtatttagaaaccaacatctgagcatatcttgggatattgcagcccccaggcccttttagtggacaaatctatgggttaagtatgtatgtccatgtccatatacacacattaacatctgtatgtctgttaacattcacaagttcaacaacacatgctttattttagttttctctttcatggatttgtgggactccttctgtgacaaggtgaaactgggctccgactgttttgaatatgtttatttactcagtccatcccactgtgtgttggaatactcttccgtgtagacacttctcaactccctcaaacaccaacctccacgccaagcccttctccctgccatatagacaccctcctcgtctcacttggttaccccttctggacagacggtactcttctgcagaataaggcatgtcttcctcctggtggagggcagccccatggcaaagtacttggcttggcaagcagggtgtgttggctagatttcattctctcaattgaccggacacctttgtgttaatacgcaactttatgtggcaaccctgaggactctgccccaccccagctctgcacccatcttgggactgaggcactgctgctgcaggggtgctgctctgttaaacctaggaacagaaagggtgttgttggtagttgactttccaccatcgatgccggaagataacagaaaactcagtaagaggggcataaagtaggtagacagagaagatagcaaaagaggactgctggagttttggtaaaaggattgtgtgcctgatcctggtttgtgtccgaggctagctgcatccctgcccttggtatttgagggacaatgttataaaagatttcactcttgaagttaagctaccaactgaaacaagtcacatggtcaagctccaagtcaagggacaggaattacactgtgtgggaggaactgcaaagttgcctgtagaaggacccggatacagacagggccaattacccagtctactatagagaggtcaacttgtttgccaagggctaacttgttaataagtggtagaatctaaatgaggtctgtccagccagggtgtgtcggtatttaatggctcttctactgcttctggataaaatagtcagggacttgttcggcatgtgggttgctcagggtgtacaggccatttataagggtgttcctttccttttgctttctcttgcctccttgtatgtaggaagtatactttcaagaagatagtgttaatcagatacagaacttccaagaaccagatggccttcatttctttcttcctgattagctatataaaaccaattgtccaactgagaaaggcttaattttacaggcttaccggggaggcaagcttattgtttacagctttcaacctccctcttgccttccttgccagaggctcggctccagcaagggaacctgaatctaacactgaagaattttggaagaagttggatttttacaaggagtcctcacacagtggatagatacgaaaacggtctctttacttctgtgagttaaaggtgtgcctgtgttgttcttagggcctgccttctatatcttctttgttgtgtcatattttaaatggcaaatgacattgactgacagtaagagcttgtatcgtatttttcagatagtatctgcattaatgtcctgtaggaaaacgtctgatagtgctgcagaccattttaaggaattgaaatctaaaaatttcactgaattataaatgtgcaggtacactatataactaattattaagcttacaaagcggccaggtggtacttggagaatcttagtatttagtgtggtggaagaactattcttgcatcagtggaaatattacactgaagccgtgtgcttttttatgcagagtaaagataatagtggctggaatacaggatcagccatgtgctatgtgaaagatggcaggcttaaaaaaatccatttgtatttctggcaaattgtcttaacataatccacatgcctttctaatttaaaatataaaaaattaaataaagtttatactgaagttatatccattaagaaactggtaaattagttaagtctcacaagcttagactccagcatgagaggggggtgtgtgtgcctgtgtgtgtgtcctgctcacatttgaattgtgaattcacattgcattcccttgcaaggatgtgccatttttaattaagactaaagcatggtggggtattctaaattgggcctgattataattgcagatggcaattgagcttttggaagctggtttctttaactgttaaataaaaattgtcttttttagtattggtttgcagaagtttagcagtggatgtcgaggggaaaaaaacggtaacctctttctttccttgaaactaaatgtcacagcatatccatcttctgttaaaggggtttagctctgaagaaatttttcttaaggcctttttaaacaattgatcagataaaaaattttggctcataaagctgaactttccagagactttctgttgatgagagtcaatacagtaaaaaatgacagtattcattgttattataaagagtacttttgaccatcacacttttagtgatcataattagtaccttaggctgggcttggtggctcgcgcctgtaatcccagcactttgggagcccaaggcaggaggaccatttaagcccaggagttcgagaccagcctgggcagcatagtgagatcctgtctcaaaaaaaaaaaaaaaaaaaaaaaagttaaaaactaccctggtgtgttggtgcgcatctgtggtcccagctactcgggaggctgaggtgggaggattgcctgagcctgggagatcaaggctacagtgaaccgtgatcatgccactgcattccagcctgggcaaaacagtaagaccctgtctcaaaaattaaaaaaagaaaaggtaccttagcatacagagccttcttctgtttggtaggcaaacatggctttgttctgtgctccaaaaaggatgggcttgacagtctgggcttttaatgaatttctgtatggagttctatatacatacaatttctgcctattgatgagtatgtacacccacgagaccagtggtttgtaactgagggagggttaatagttttgttctcttccaaggggacatttggcaatgtctggaagcattttcgactgtcaggactgggaggatggtgctactggcatttggtaggtagaggccaggcatgctgctgggcatccagtagtgcacaggacagccaccgcaggaaagaattatccagtccaaaatgtcagcaatgcagcctttgagaaacccaacactgaacaatgagcctctagtgcctctttttgtctcactgcaaaaatgggcttgggttcaacatgggcttcctatattttatcttcccattatagtactggtgggtgtatgaaacatgaattaatagaaaatggtgttttctggaagaagtcaacaaggaaggtgagctatgaattagtggcatagcaggtaactggtattgtggacagagccagaagtttacaacagacctggtagtggatttgtttatgggctttggggaaatggactgttttgaaccctaggaagtctagctttttttgggtaaacatcacctcttaaatgttaactcttctaagtgatggattattaaacaggtgctgatgaaagcatcttaataaaacacatcacacagttgtgttactccttcacgctgagctctgcctaatgaagattggctgtgtagagccactactgcttcattttgttgcattttgtatacacagttcagaaaattaagagacaagggaactagtattgagtagaataataaaaggactttcttgaatgatggcacttctgattttttttttccctgccctacgtgactggacgaataagggaggaagatgtcatggggcctctaaacagctgataacaacagggttcatttacattttgtagcttgtgtgtcccccctacttcaagcacatgcgtagggaattgaaattgcagtttgcctattacgtgttggcagtaatctttcaaaaaaaattttatgtttcaaaatcaggcagccaacagcagtagccagtgatatatggggctattgatgcggattgaatttgcagagggaaaatgggatttggttgccatatgaactcataatgaggtggcctcacagatttgtaatggtcaaccattatttgcacctggaatccgccaggaatcaaatacctttcaaggagagactgaaatgaaacttgagggttttttttgttcctcgtccggtgaatggagcagttccaaagtaatgtcatttggtttgtcagttgaagatgcttaaagttaacagttacttttttttttcttttttgaaatggagttaacgctcttgtcacccaggctggagtgcaatagtgcgattttggctcactgcaacctccgcctcccaggttcaagcagttctcctgcctcagcctcccgagtagctaggattacaagtgtgtgccaccatgcccagctagtttttgtgtttttactagagacagggtttcactatgttggccaggcaggtctggaactcctgacctctggtgatcctcccacctcagcctcccaacatgctgggattacaggcgtgagccaccgcgcccggccttacagttactcttttaataagcgtagtgtggatcagtggtcttcactgatcccattgccttatcagcaaaaaaaaatttggacccatgccccagtgtgtgtgtgtatatatatatatatatatgtgtgtgtgtgtgtgtgtgtgtgtgtatatttatttatctgttatgttcttatactaaaatcctatgaaaattataaaaccttaaaaatgtaaagcatgaggtcaaaactattctggatatagaaggctaaatattgtttcccacatcccctttgaattgtcttatgcacccctggatactcagtgctggaaatgaccagcaggaatcctgccttaggtgacgaggctggcactggagaatgttgggccgtccttccttccatcctgcagggatcttgctaaaataaatgacttaaccttgaaactttactgattacgtggtatgtgctatagatgggattggattaatactaaacatttcagcagcagttcttctccccaggtgtggggtgtaggcatgaaatagcttaagtcaactaaagctcacctcttatgttttacctggatactgtgctttagaagtttactttctgattcatctcagcaattttgtttttttcgcttcctccctctttctctctctgtcttccttaactccttcactctttctgttcttcctttattcgtgccaggggagattgggacacagtattttccaaatatatttatcctctcaggtcagttggagtttgtgggctaagagtatgagatttgaagttaggataattatagtatttggatgagtgaatgaatgaatcaatagatatgtcccttcatccaaactatgctggttaggtgattggtgggcaagctggtaagttcctctgattctctgttttcttatttgtgaagtggagatcgttgctaatgtatgtggttctctgtagaattaagtagagaacacgggaaatagccagcacatggtctggcattgtgtacatgcccatttaattttggggtaattattatctccacagtccctgtccttcttggaagtcctgaaagtatttcttgaaagtcatcactcaacttcagagcatcttagataccaaaataacagatggtacagtatttgcggggcatacatctttcacttaggtgttcttttactttccttttcccgcctaagttaactttctagagggaggaaaccaagtcttcactttattttgtggttgacttttcttgcctccctctccaacacctcgctcaacaggtaatcaaataactaatttttagttgtcaggtaaaaagacatttttgtgtttaagttcttcaaaccttagcttttggttgcatcagaagacttgctttgaaattgcacaaggtaaagaagggggagctggaaggatttcaggaaggagagtttgctatttgtaattagtgcctaacagaagttggtacatttctgtagttttccgttgtcagtcactttggatgataatttttttttttgctattatttttaagtgacagattgcagtacgtattttaggacctgccacccattttgatttgaaagattatgttgtcggaatttcagacactgcaggtaaagatctaattttactaattaacaaggatttacaaatcttgtaaattactttcctcttgcaatggaaagtgcttttctctgatttattatacaaataattgcaaatccttataactgaacaaggtaaaacttttcgtgtcttttggaatctgttttctggttttgtgccttcagtaatagtcttaccttagtagacaagatgtataaattgtgtaaattactaagcaaaggtgaagggaaatatattttggttatttccagttagtaactgcctcttaatgaatcacattaagtgccatagtcacttctttttttcccaaattgtctttaagaaggtacatttgcaccctaagtacaaaaaagggacagtattatttttctgcttttaataaaagtaataatgtcatatttttcctgttctagaatttcaggcatcaccccctggagctgatggagagactggtattccactgtgtatcttaatatcagggaaatatctcacaggcacatcaagctgatatcacagggtttccttgattgtaaacaatagaatggattatgactgacatgagccaacacttggatttggaagggtatgatagatttttttgctcagggtctaagaatcgtaagataccaaaccttggaaggggcaggaatcaggacagtgggagctaatggcaagttggtggtggaatacattggccctaccatgttttgtttttagacatggcattcccaagactcagatccctccttgggcgaggttctgatctgcatgactagggaggacagaacaactgcatggttaaggcagaggaaagttgggggactagaacacagagaaatcggggggaaggaccttgaggttaattacaactaggccttgctttctttaaggttatccagtgcagggctttgatcatagagtggattttcaaacattggagcaggaagaggctcccgactctcaccaaagccctggggaatgaatgacttgttcaggaggtaggtatagcttggggttacacctggttttctttagctttgcaacagactagagaatttggttcttaagtgatattatctaaaattgggaaagaaaatctctttcagttagcagagataaaatattgacaatgctgtggaggggatgtctataaataggccttctataattgaaaaggagcaattaaagaagacacaaaaccttcagttgctgtttgtagaagtcacatacagggctacctgtgaaaggcttcacctgtttgaggattataactatcacttgaagaaacaaaacatctgaggagacaggagcaggcagcatgagtctatttctaaattttactgccaagcaccaaatacagccgctggtgtttattcggaaatgctgttgtttgaaggcatatccaaagttctgttagcctcactgcctccttgcattcaggtgctcagtttacctgaaacccctaaagagcagccactgaactcaggagcagatcaaaaccctctctaattcctttacacttgggacccaccccttgataaaggttttgggtttgctgagagtgcagtatgtcatggtggtcccctgtcccagtatgggttggggattaagataatcctgtgaatttaaatcccgactctaccacttaatagctgcgaaccggagcaagcttttaacttccctgggcctctctagatatgctgaatgaaaatctaccccctcctccttccttctgagtccttgtattattaggcatggcaatgaacccaactaaaaaactacatttcccaacttcccatgccagtagggatggtcagtgagttccaactagaagttgttttgggcttccaggaacactggaaggtgagaagaagtatgctctttttgatttttcacattttgcattttagatacgaaatgtagatgtggtggtttgagccacagcatccattttgggaccatgagggaaagcccaagggcatcgcaaagacatggctatctttggggtgctgagttctattaatacctgcagacttcttgttatatgaaagaaaattaacccttatatgtttaagcctctgatagcagcagcagaatgcagttcctgatacttaacctcaggttctgcatctgcaaaatgagcataatagtactcaccttctagggtcattctaaggattcagtgatagtgcatacacagtacttaccactgtgactggcagctactacttttctttttaaatgactgttaccattatcaaatatagggatgtgtatttatttgctagggttgtcataacaaaggaccacaaactgggaggctcagataacggacatttactgtctcacagttctggaggctggaagtctgaggtcaaggtgtcagcagggttaattccttctgaagctggaagggatggatctgtccaactttcttttctttggctcgtggatggctgtcttctgcctgtgtcactttgtgtcatcttccctttacgcatatctctgtgttcatattttctctcttttcaaggacatcagccatattcgattagggtccaacctaatacctcattttaacttgattacctctgtaaggaccctatctctaagtaaggtcacattcggagatactagatggggtttaggacttcaacataccttttttaaggggggatatgattcgacccatcacagtacatacgtaacattatcagtcaaactttagtctctcaccctttttctgattacagaaactctttataaaaaaaatcaaatacttcttcatgaaaaattgcttcccttcccaccaaaattgtcctgttgtataaatgacttttaactttcatctcttacattttaaacccatcaactaaacccagcttctggaatctaagggcttgtaatggggccatttacatttccagttagttttagggtggtaatgatcggctcttaggacgctcttcgatttgagtattcacttgggtgtgtttcaagcccgtgacttggaaatacaagggttttctgtttattattccatactctttagagtagtgttgatgtggtcatagtcatacacgtcatgggatgtttgctgctctcgatgaatttactggccattggtgccctggagtatctactacagagtgcccaagacaggctgcctggggatatttaatgtgtctaagaacactcttaagcatttcagcctccaacataagctcagtaaggtgggacttgcttaaatcatattccgtgtataaaaatttaaaaatgttgaagattttactgttgcagaacttactccatttaaacttgaaacccagtgttcctacagctgctttccttttctatgcaaatatttcaagcattgagaccattacctcctgagcaaagcagagtcatttatgcattaaataaataactttcctgtcccaacagggtttgtttgttttttttttttgggggggcgggagagatcacttttaggcgacattatgtgtttgtaggggcttgtcttcaaataaaaggcataattgaaatacagctgaataggaatcaagagtgtgattcaagtgtaaggtaaaattgatggcatctcttattgcttcgtagatgaattactttatggcagctttttcctgataaagcttttttaaaaactaaaaatgcattattctagtctctaattgtccatcctgacagcagcaaaaaagaaaggctgtgttttgctttttgtttcttttccctcccttagcagtgatagtagaaattgcttattgctggaaaatctgtatttgcctgctggtatgccattaaaaaagggatttggtagcctgaattccattttttctttaacgcaaaacataaggggttgcattttccatactggcagaatgtggaatgggtaggtgacttgaatgttgtcttttccacttagtattaccgttcaaaacccacgtacaccaaggaattggaatattcgaatgtgagacagaaagatgacattgcggttagcactgtctgtatccaccaaatcgtgaaccttctcagagtcatagtcccagccagggaagtaagagtgtcgctcttcactattgctgcacacatcctgctgctgggtgccaaagtggggcaggtgctcaacttcccagcagtgttaggagtaaaggctggtgggggagaaggctggttggcagattattaaatgtattttacatttgccatccagtttcattttcatggcccacatggccacctaggatatattcttagaaaaaggaatagtaactcaaatcaagatcaagcttctgatcaaatgctggggatacagcctgatgtaaaatgggacacctggatgcaatcagcaaaacccacaatgaggggaattctacactacaaatgatcctgttatatccaatttatgtatggaatggcttaaagaggcagagaaaagcctttggattaaaagagacttgagagacctgtcacccaaatgcagtgtgtggactttgaatttgaacaaatcaatgttaaaagcaaatttttttttttgaagtagggaaatttgagtactggatgttacctgatttatggaattattgtcacttttaagtacaggcaaaatagtagtgttggaattatactttttaaaagagtccgtatcttttagtgacagatgctgcattagttatagggaaattatgatgtctggaacttgctttaggataattcggttggagtaaggtgtgatttggggtaaaaaaacataaaatttgcctgatacgataattgttgagggtaagggaatggttatgtggggactcttctatctctgaatgttggaaatacaatagaaagttaaaacataatgacttacctgtgttctattctttatgatggctgctggctttatcaggcctacttcttttttaagtatttgtggggtaatgaatatttaaatatgtaacctttttacctcaaagtaatctaagtataaatatggtcactaactgcacaaccaggtctcacagaactgacaggttttatttaatgacccattttcctttatttgaactcagccccatggaataaagggaatgttttattcatcagactgttcacttttttaaattttagaatgcttttgtaggaattagcaggtgtttaattatcaatgggaggattctttatttgctgaatgcagtagaaggtcattaaaataagtttaaaatatgaaagaatcaagtagtgagagaacttggggggaaatgaataaatctattctcttgtgtcctaggtttgttaaggtcaaatgaggtgtggtttaatgttttgcagcttcattgtaaaccaagccaaaggaaaatctttctgccctttggtcaaacattcctgagtgaagagagcactggctgacatggaggagtgccaacatttttgggtcatactttagaacttaagtttagataactgagataagccaggatttatggacagacagatatatccctagtctcaacattaagccattatttccatattgcatcgtctttcatgctctaagtatatgttggagtgccgactgtggatttagctgtgtgctaggcactggggaataagacaaataagaattagatatatgtggctcttttgtttaacttgaacataaatgttttccctctttccctttgcttgtaatttttctcttttctagcaacattgccctgtcaacttcttatctattttttcatttttatatatttattttttttgagatggagtctcactctgttgcccaggctggagtgcagtggcatggtcttggctcactgcagcctctgcctcctggttcaagtgattctcctgcctcagcctcccgagtagctgggactacaggtgtgcaccaccacacccagctaatttttgttgttgttgttattgttgtattttttgtagagacagggttttaccatgttggccaggctggtcttgaacttctgacctcaggtgatccgtctgccttggcctcccaaagtgctgggattacaggcaagagccactgcacccagccctgtcaacttctaatgatataatgttggtggtgatggtaaattatttggatttggggaaaaggtgtggttaaggtgaagcagtttggaggtggggtaaggtagggggaggtgaacagctaccactcatccatctctgaccctgtgccatactgcttatttattcatccacaaatcctgcaagataagaatcacccctattttgcaaggaaggaaaggaaactgagcttgagtaacttgatcacagtctctcgactcataagcatctttgttggtaaacacccaggtctgtttaaagctgtgcttgtaacaaacataccacatatgttctccaagacggtaggtaatgtgggctgtttttcagtgaaacgtctgccatgcattttcaccatgatgttgctttttattgatttcatttgggaagtttagggagaagtaggagggacacttgggaaatagaggcatttgtgccttcaagcagttcactcggggcacctgcatgaacttccaggtgtcctaagttagatttattttttattttgagatggagtcttgctctgtcatccaggctggagtgcaatggcgcaatttcagctcactgcagcctctgcctcctgggttcaagtgattctcctgcctcagcctcctgagtagctgggattacaggcacccaccaccatgaccggctaatttttgggtttttagtagagatgaggtttcaccatgttggccaggctggtcttgaaactcctgaccttgtgatccgcctgccttggtctcctaaagtgccgagattacaggtgtaagccactgtacccggcccctgagttagatttatacctcaaatgttttctgggtaaaagagggtcctaggaaggacagacactattaggtttaattgctgtgaaattaattgctagctgttcatctgcgctgctgctttgttttaacatcaaagttgacaaagtctccacggtgtagtagagagaggtctttgtgaagaaagctccttgccagctgtgggcattgacaggaaggcactctcttcctaaaccttgtaactgatattgcttttgcggtctcaggtaagaaggagaaaaagggtaaaagtttactgtagattctttagaaagcctatggcatttttgaagtcataataaaagatagattccagtggatctcctagaggctctctgtgttaactggcattgtttaagtgtaacatgtcttcagctttaggctccttagcctttcaagggcccttctgtcaagctgatgggctaccatgccagaaatgaagtccgatattaaaatgtttgttcaacagaaggtggatggagagcagcattttcaagtaatgggcaataaatcatggaattggagaagttactcaaattttggtaatgtgcccaaagaccctggccatggccttatgactgagacatgcatataagtggtggttcttggccttagggtgctaggaattggttgattggatgtgtgctttaaatagatgatattattggttcaaaataaaatgatggggtgagaactgtaaatgcctcctagaccatattctgggtcttttttatggagttgtagatagagcagattttgagataagtattcatttagttaaaggtgttgtcatgaaattccttctcaaggagttgacttgagctaacttgcatgttaacaaataccactgttctggctttccaccatcctgtatgaatatggaagttacatagaaataaaacatttaagttttcttagcgtttaaagcactaaactgtaacatatctggttaatactttagtattgtgtgctttcctattaatatgacttttttcccaagtaaaagatgttttctcctgtcttcctctctgatcagggaaaagaaaacagtttctgtttttctttggagagctcttcaggggatctttttaaggattgactcaactttaggaatttttcagttgagctgacattcattgcaatgtgtttgtggtttagcatggttcaaagtatttatcatctcaagtctctttgaccacaagggtagaaagaaatattcgcacacttgccccaaagtgcaagtgtgcacttaagtagattgtcaactacttaaaaaatgtatttttagcggggcgcggtggctcatgcctgtaatcccagcactttgggaggcagaggcgggcagatcatgaggtcaggagttcgagaccagcctggccaatatggtaaaatcgtgtctctactaaaaatacaaaaattagccaggcgttgtggcacgcgcctgtagtcccagctactcgggagggtgaggaagaaaaatcgcttgaacccgggaggtggaggttacagtgagccaagattgtgcgactgcactccagcctgggtgacagagcgagacgctgtctcaaaaaaaagaaaaaagaaaaaaaaagtttttttttttaaagacaaatgaaaattcaaatcttcagactattggaagcagggaattgttatcagaagtgaggaagcagagctgaccattaaagttttttactactatcttgaaattgtatggtaagaaaaaaaaaatgggtagcaaccttttgccaggtgtgacaatttctacctgatctgttaaatttagtacagtagtccacccttatctgcggttttgctttctgtggtttcagttatctgcagttgcctgcattctgaaaataggtgaatatagtatgatagtatattttgagagagagagaccaaaactatattcacataacttttattactgtttgctgctatacctgttctatcttagtggttattgttagtctcttactgtgcctaatttataaattaaactttatcatggatatagttgtatagaaaaaccacagtgtatatagagctcagctccatccatggtttcaggcatccactaggggtctcagaatgtatccccctcagataaggagtgggtctgctttatattattttccaaaaattgcgtttgttatataaaaatccatgttgccaaagtttttaagctctgtgttttcaaaagtagtttaaatactataaaagtgcttattctactcagtcattggggagagtatttctggatcagtagagaaaagggaaattgcaagtacatgaaaagcttccccttattttttttgtgatgtaggcactggaggtacagatataaacaagatgtggaacctcccttcaaggaattcataatccagtgacaaagagggaaatgtaaataatcaattgctgtaaaatgatatagatgctctgattgtagcctggattggaggcagtgggagccacatatagggagtgatcaattctgcaaaggtaagatttcggtcaaaaatctatagtcagctgggtgccgtggctcacacctataatcctaacactttgggaggctgaggtgggcagattgcttgaacccaggagttcaagaccagccttggcaacatggctaaacctcatctgtacaaaaaataccaaaaaaattagctgggtatggtggcgtgtgtctgtagtcctagctactttgcaggctgaggcaggaggatcacctgagcctggggaggtcaaggctgcagtgagccgtgattgtgccattgcactccagtctgggtgacagagtgagaccctgttacacacgcacatacacacacacacacacacaaatctatagtctagaggaagttataaggcacataggtgtaatgcttataattgataggaagtgatgagtatgaaagcaggttgacagataaagtgctctttgtttctagagaaagaaatcacttctgttctaggatattagggaaggcctcagtgaggaggatgataattttgctatatgttcagcagccattttcagatgagatcaggcacgttcagggtggcatggccatagacacagcagccattgtcagtttgcaaagagctttcaagtacatcatctgctagttatttggaaaccctgggaggaagttgtgataatttagataatgacccagagaggtagggcaacataccaagggccacccagcaagtgatgatgtaagcatgtgtttaagttgagcatttctgaccaattatttcacaaagaactagagtcattacatcactttccttcatccccttcatccccctcccctccctgcccatggcatcacattacatgtaggataaagctttcactctggaccatgttctgcaagattccacatgatccagcttctgtctttcttccaggactagccttcttgcttaccttgcatgccggctgtttccagaatttatgaaacttttttccaccccagggttcttacacatgctgttcagttacacagaaagagtcatccccaccatccttcttcttgatttggcgcattgttagaatgtcacctccttagggagacttccctgatctttgtatctaaagcacatcccatcctcccatgagcctgcatctctcttctctgttttatgtttgttatggcacttagcactatcagaagttgtccttattgttcatttgtatgttgtcttgtattcccaactggagtgtgagtttcatgatgggagtggcagggattctttgttcactactgtttcccccagcacttgagatataggaagcacttggtaagcatttgttaatcaaataaaggaacctgtagtagcttagggtacaattacaagtggttttccaagagccagaaatgaaagtcattgggatgagttatagatgcagcttatggattggaaatttggaatgtatttgggacaaaatgatgtgaaacattttaatttaatttttggattgttcattgctaatgtataaaaatacgattgattttttgtatatttatcttgtatccttcaaccttgatgaactcgtttatgatctctgatagtattttttgtggattccttaagattttctgtatacaagattatgtcatttgcaaatagaaatagttttacttattcttttccaatctggatgccttttatttctttttcttgcctaattgctctggctagaacctcagtgtagaagtgaggtggcctccaaaatagaagtggtgagatcagacatctttatcttgtaccttatcttaggaggaaaaatatatagtcttttactattgagtatgatgttagctgtgagtttctaatagataccctttttcaggttgaggaagttctctgttattcctagtttgtcgagtggttttttttttttggtgttgctgttttgttctttttatgaaagggtctcagtctgtcacccaggctggagtgcagtggtgtgatctcagctcactgcaacctccacctcctgggttgaagcgattctcatgcctcagtctcccaagtagctgggattacagcagtgtgccaccatgtctggctaattttttttatttttagtagagatggggtttcgccatattggccaggctgttcttgaacgcctggcctcaagagatctgtgtgccatatgatctatatacattaatttcttactgaagcaaaaatacccaaagtgccaggattacaggtgtgagccaccaaactgcctgttttttgagacagagtctcctactgtcatctgggctggagtgcagtggtgcgatctcggctcactgcagcctccgcctcccaggttcaagcgattcttcttgcctcagcctcccaagtagctgggatacaggtgcctaccaccacgcccggctaatttttttgtatttttagtagagacggggtttcagtatgttggccaggctggtctcgaactcctgacctcacgatctgccactttgacctccgaaagtgttgggattacaggcgcgtgagccaccgtgcccggctgtgtgtgtgtgttttttttttaaaccatgaagttgtgttggattttatcaaatgctttttctgtggaaacctaaacttttaggctacagttctttttaaagcaggtagcaggacagaacttcttgaccaccactcagcagaggtttgaaagtttcccctcttctcctgtgaggtcactaagcatttgttacagagttaaccgagaagaatgcctgtgcttatcctctgggaacaactgtaatgatgggatgtttctctataagtctgagaaataaactgctggaatgtgatgccatatctgatatgctgtgtttgttttgccagtgtaatactgtcacaacactgttgagtgagctgatttcaagctgttgatatagttcagaccttggcagttctctaatctccttgacacttcagtgtttgattgcattcgtttgccctgcaaatagtcgacagtgtaagtgatctcaaagtgagaatatatctaaagtctgtatttgtaatagacaaggtttgaaggaaagctgagaccttgttaaattcacatatggacttcctgagcatgcaataaagacttaacttctacttgatggagcctgtcaaacagccatattacaggcatgatttggttgcatgggacttctattcttaatgttaaaataaaatccaataaaatgagttggcgaaaatcaagctgtcatggagttgctaaaaatcttgttccaatgaaatgctatgagaaaggccttatcattatgctgtttagtttttaccaattaccctataaagtattaatttatatatatattatatatataaataataattattattagagacagagtctcactcttatcacccaggttggagtgcagcggcatgatctcagctcactgcaaccttggcctcccaggttcaagtgatcctcctatctcagctttctgagtagctgggactataggcatgcaccaccacgcctggctaatttttgtatttttttgtagaggtggggtttcaccatgttacctaggctggtttcaaactcttgagctcaagctttggcctcccaaagtgctgggattacacatgtgagccactgcacttagcctatattattaatactattattattgttgacttctttttacaaaacagaaagcttgagtcttaggctgattgcttccctaaggcttagatggcctatggatttgattccaggtagcctatctccacattttgtactcttgaacattttctaatttatttactaattcctcagtcacgtaaatgtcatccatgaaaaatattagagttttggtatctcagagatggttccttagagctctcagccctaaatggaaacacatctttttgatagtgtgttttattttccaaatcccaagaatctgtgaaattagtagtgttcttgaccaacagttagatagcctctgcttgaatgcttctaataactggagagctcaccacttcatggtgacaacatttttcattcttgcataaattcttcctaaatttgagctatcctgaaggtcagtttagctttcctatcgtctaaagtactgtatattgctgtctgaaaacacacagacaactaaatgctccagttgctttttttcccttttggtgacagctttattgagatagaattcatatagtatacagtttactcatttaaagtattttgcatatattcaaagagttgtataatgatcttattttagaacatttttattatacccgaaagaaaccttatacccattagcagttacctattttcgttaaacacctccagccctaagcatctactaattactatcttataaattcgcctattctggacatttcatttaataggtggccttttgtgtctgacttctttcacttagcaaaatattttcaaggttcatctatcttgttgtatcagtactttttttgttgtatttttagtagagactgggtttcaccatgttggtcaggctggtctcgaactcccggcctcaagtgatctgcctgccttggcttcccaaagtgctgggattacaggcgtgagccaccacgcccagccttgttgtatcaatacttcatttattttatggacaaataaaagtccactctatggatataccacattttgtttatactctcatttctttatgggtatttgggtagtttccacttttgactatcatgaatagtgctgatctaaacatttgtttcaaatgctttttttttgtatgaaacactgctctgtctgctcctgcactgtgatgattttttgattaatctcatgtagtattttacttggtaaaatctcatactgttggtattagtctggttccgccttgctggaagtttgaaattttgattctttgattgatcatatgatttgttcatttcaaccttgggtactatgccaattggttaaatctccattctctgtcctcatccatgtcagtgatcagtatactgattgctgagtggtgtggcctctctgccacatagcttattgctgtggaggaaagagagtcttctcttagccattgttctgtgtggagttggcggactaacacatttttatattcatatgcaatattttcaattctaaaaatccttatgtttgtaccagaactaagatgtcctggcattatggaattattcatgtcagttgcctatctctggtcaggtagttagttgtgacatccagcagctcagactacaatttgaattctggctcttgtcccacttattatcagaatgacctttggcaaatgacttgaaggttaacttgggtaattttctcatctggataatgcggatagtagaaggacttaacctcataaggtttttgagaggactgagtgaagcagtccccacaatacaccatcatgtgctgggcatgttggtaagggctggatttcaaggatgaaaacagaggccagagaactttctgtggctttctgaatgtcaaaactgagactgtgcagatcaagcagaacgctttctgttccttccaaggcttgttcccttcaggtttcagtttcagacggaagcgaagttgtttgtgatgccggagcacacacctgcgggaactgtagacttcttaggagtccaccggggttgcgtcgcattgcttccacgcctctgtcctcaccagtgttgccaactgtggatttgtgtgtgtgtgtttatcgttgttggccatgcaccagaaacagagatatcagtcacatttaaactctgctgcccaggaaactcctgcctacaaacccagcccagccctttgagaacctcaccgaccaagtgagtgatatgttgagagatgagcatagccatcttaccattcatgtctgtgaattattatttattcagactggatctcgttaagagaactgtgtgtaatcttagcatgataatcggattccacttatcacttggaactgtgactcacttttggaattttaaggacgtaattacaaaaaaaattcttggttatcttttaaaaaggagtctgttgtccttagacttgttaactcttcaactgctgttttccaaatcgtggtacaaagttattatttgcaggtattcccaagtggccttataaaaaccaaaaaggcttcttgctaattctcttcagatgctgatatagaaatgacactgatttttttctttttagtatttaagagcacccactagaaggatatttaatatttgtatgtagttttttttttcctgttatgttaagcagaatttcaggaccttgctgtagagcagcatctctccatttaagtaatgtgtagaccccttttcaaaggggaaagcaccttgcaagaaccctgtgaattgtaccaaacccaacaaacataaggtaaacctaaggtttacatgcaagtctcttttgattgccagttatcagggttcttgcctggcttgttgttcataaatgggaatattttatttttagattatcatagaattgaaaaaaaaaatcttcccaagtagctgggactacaggcacacaccaccatgcctggctagtttttttttttttttttttttttttttggggtagagggatttccctatgttgaacaggctagtcttgaactcctagcctcaagtgatctgcctgccttgacctcccaaagtgctgggattacaggcgtgagccaccgtgcccagccttgccatgcctactttttaataaggttgttttttgcttgttcagttgtttaaattccttatagattctggatattagatattggtcagatgcatatttgcaaatattgtctcccattctgaaggttgtctgtttactctgctgatatttttcttttgctgtgcagagccctttagtttaattaggtccagttgtctgtatttgtttttattgcaattgcttttgaggacttagtcataaattcttttccaaggctgatgtttataatggtgtttcctaggttttcttctaggattcttatagttcctgatcttacatttaaatctttaatccatcttaattttcatatgtggtgaaagggaggtgttcactttcattccgctgcatatggctagccagttatcccagtatcattaattgaatagataatcctttccctattgtttatttttgtggactttgttgaagatcagatggctatcaatgtatggctttatttctgggttctccattctgttccattggtgtatgtgttggtttttgtaatagtaccatgctgttttcgtcactgtagccttatagcatagtttaaaattaagtaatgtgatgcatctaactgtgttctttttgcttaagattgctttggctattcgggatcttttttggttccatatgaattttagaatagtttttgttttaattttgtgaaaaatgatattggtagtttgataggaatagtgttaaatctgtacattgctttgggcaatatggttgttttaacgatattgattcttccaatccatgagcatgggaggtttttccatttgtttgtgtcatttgtgatttttttcagcagtatttcgtacttcttgtagcaatctttcacctgcttgattagatgtattcctaggtattttattcttttttgtggctattgtaaatgtgattgcgttcttgatttggctgtcagcttgaacattattggtctatagaaatgctactggtttttatacattaattttgtatctcgaaacttcatactgaagttgtttatcagttccaggagcgtttgtctttagggttttctagttatacagtcatatcagtgaagagagatagtttgacttcttttcctatttggatgccttttctttctttctcttacctgattgttctggctaggactttcagtactatattgaataggagtgttgaaagtgggtgtccctgtctttttcctattctgtttttcattcaataaaaactcaacacatactaagtatggagtggtatatacctttgaaagcattacagacactacgtttctctttaactgggtttgcattccactggagactttcactgctttgcctcttgctttaaactcttaccagccagatattttcctttcttgatctaccctcttaagagtcctgcccattgtccatgattgacagcttggtttcctgattgagtgctttatgtgaacatgaaaattcatagcatccttaagggagaaatgtagttgatgggcaaagaacagacaacaatcagtcttttcccaaaatgaaagccgccctctggagagatcagagtaggtcctggggtatacacctggggccatttccaacactaaaatgggctttctctccagtgtatatgtgttgatcctcctcctcctcctcctcttctttctcctgatgaacacaacttgtagaacataaaccaaggatcaggctctataccaggtgctttttgcacattaccatatttaatccccgtaagaccccaaaagggaggtactcttatcccatttaacagatgaagcaaatgtcttaaaggaaagatgttagctgttttaaaagccttgtggctagcaagggtctgagctgtctgatcagagtctaatggttgccattaagcagtcttcacccttttcatgatgcaaaatggactttcaggtttaaagaaacgaagtctaacacaaactgcagttatttaaaaggcaatgtagtaatttaatcaagatccacttgcttttggatatttcacgtttctacttctggtttcttcttggatcactttctgaatataatggatctggagtacagggccacagcctttagagtttcttttctcttccctcagtgttttaagtgggaaggtgtttgcccatcagaagagaaactgttggattgcatggtgccccttgctgtttgaggtgcctctgaggaacttggtgtggagataggaggagatcaggagaagattcttcgagcttcggctagaagatgtccaggcaggttatcttctaactacatgcaactagaggcatatttacagagaataatctgaagcttgactctttgatcatcaactccttggagtagcctgttagctcttaaatactctcagttctagtgaaacaaataaaattcctacctccccctccaccgttccttcctcctcctctctccagatttcctccccctccctccctgaaatatatatagaatacccaccatcaagcattgttcttggctctggggatgcagcagtgaatggaaacagatgaagtccctgtccttatgggatgtttctattggggaacaaagtggaaatctcgggagggcaagacgcccagcacatggttatcctgtggactgcaggaatagtgagtagtttgttaagcaataattatttttattaacttgggggagagaaagttttcacatgtgtatttctccttgccttctctccatgccacccattttactgatatgtttttaaggaagaatcaccgagttagttctgactctcatttaggtaaatgtttccaattcatttaaggttatcggcttttgtgttttgtcccactacagatgggcttgcggttctgtttaaaagatgggtcatcattacatatatagaaacctaatccaggtttagtagtgtcaacagatgtcttcatgaaatctgattttaaaaaatcaatttctgtggttgatttggaaggagtgggcccaaatctagaagcacggacatgggctatcatttcagtgccttttagaaaaattgcaaagcaggaagtaaaccttgcttgctgaggtttaaggatggatgggtctaattttgttttgcatttatatttaatggcctgggtgcctttcctgtgggctggtgcacatttagctaatgaatgccttctgaggagaccttgttggttatatggagggcaccccccagcctcctcatctggaagcccagagagaaacctggtgccgttgcccgcaaggccgctgcagggctcacctgcagagttgtttttgtgttgcccactcgcctggattgttagtttgtaaaaatcaaaggactaaggcagaagccctgatgctgaccccgagttattaaattggttcctctggccatttttctcagccacagagctgcccactagccacgggccctgaccccgggctgtggcgtatgcctctctctccttggggccgtcagccttgcagtttgtaaagccatcattcagttgagttcaggctgttggttctatttttctcaagtacagtttgttattttgctctgctttgctgctcatatgcgaggacctttcttggccagcctcttgagatcttctgttctggtgatagatgcttgattcaggtttggagagcagcttagtgtcctcagataattctgggaaagcaactgaagagtgatctggttctacaagctggtgactggacccacaatacccagaagaggtctgcattttgcccctggcaccgcagagtgaaagggaggccagagttctctgcagactccacctgttctccttactgccctttgtagtgaatggacattgactcaagtttgtctatctacactctttggggagccccttaaaacccggatttgacttggaaatgaagcttttggttatggcttctgatcatgctatatgtggtagaagcttagtgtctgtatttttaaaattcagactggcttttaatactgggtaactaagtcatagatgaggggaagttgatggagtgatggaaatagacaattgccattttgcagcccatcaatgaattgatggatctgggcatgagacatcgacacttggtaatatcctccagagacaataagctgttgtttgcccctgacagtagaatactttacctccaaggaagtagtcttataaaaacaaatacagctgatctgttcaagtaacaatttacagtaactacagaggacacgaaaacatggtaaaacaatgttgttagggataccattggcctattccagactgaccaaaggtctgctttctttaacaaataaattacaagaaaggaaaaaatgatggaatggaaaacctacagattaaagaatttgagacatatccatgaaagtctgtagtctcagctacctgggcggctgaaaagggaagattgcttgaccccacaagttcatttctagcctgggaaacatagcaagaccccatctggggagagagagagagagaaagagagagagagagagacagagacagacagacagagacagacataccaactgatctccatatgtaccttatttagatcccaattcaaatgaattaactagtaaaatctgggcatttggagatttgaaccctgattggaaatggggcaaaattaggggagagttgttaaatttttctaggtccaataataactttgtgtttttattttaaaagcacctattggctgggcgcggtggctcatgcctgtaatgccagcactttgggaggccgaggcggtgaatcacttgaggtcaggagttcgagaccagcctggccaacatgatgaaacccccatctctactaaaaatacaaaaattagctgggaatggtggcgcacgcctgtaatcccagacaggagaattgctctaaccagggaggtagaggttgcaggtgagctgaaattgcaccagtgcactccagcctgggtaacagaatgagactctgtctcaaaaaaaaaaacaaaaaagcacccactgtaacacagtgaatgtatatagaggacagtcagcaaatgcttattgaatggtcagtttgatgatataatatttaagtttaattggattcttatagatgaactaggatacccttttcattctgagttgaccatttgcaccttgtaggaaggaacaggtgaggcttccaagtttgtcctccttcctgctctgtggaaccaaatccattatgtacacagcccctaccctaacagagacgatcacaatcacatttaaattatacagtgcacctacagagtttcagcagatgtgtgaatattaagttattaataactaattgggtgctaattatgtgccctggagttcttggagtgataaagaagtgtcacctactgtgtcaggcctctgtcttttcagctttggaaaatcatttttggcagatgtgccaaagttaactttggagctttaggttttgaatatcatttctcacaagtcttattttatttttttatgccttgtgaaaacttactgtgaaactgatgtgacttcccataagtaaaaattgcatgtaccgttttccaaagagggggtggcctgtgtgtgatgatagtgtttcatctctcgggagatggaagaactaacattaatcccaggggagaatttaaagctgctcaagggaattcagaagtgattctgaagcccagtgggtttttggtatattttgggagataactggtttggaagggctttgaacttggatcttgcaagtcttagctccatcactaaggatacgcatctcgtatttgtgcacacacgcccccactgccccctttttgttccatctctatccgaaataggactagtttggcttttgttaactggaagaaatcattgagttagaaagcctggataccaggttaggatactaggaatgtgatccatggtttctaagatttatagaatcctgttaaatttagaagaagggttttaatgagataatcattgaaaggctacactctcccctttctgtctctagttgcttgtaagctttagattgctggaactttgtgcctcctatttggaacaggcaatacactcatttgtcttaaagtcaaatccaacaagaaaagaaggtgttgctttatggtcgacataacccatttgctgctggaaagttgttaggacattagagctgcttggtttgctttgtcttttaaaattagcttcataaatgcacacaattgaagaggctcctgatcttggatattgcttttccttctcccactaagaacattaaaaaaatctcagtatttccaacccagggttaaaaatataatataaaaggtagaagggaaaactgaagatgaaagtaaacaaatagaaggccagagttaccaaatattgacaatgattaacacctgtttgttactggtcaagctggccaaaaacccagtgtttgcatttagccacagaaaataaaagctctcccagttgggttgtgattaatagctttgtccacaccccgcattccttttctatgctgtgtgtttgcccacctgttgtttggaactcctttctaggttttggccttaactgatagatgattcctggtgggatccagagactgtctgaggttcaggtttccagcctcccttgcagctagtgtgtgggcatgtgacccgggctccaccaatcacatgcatctgtcccagactttggatttactgctagttttgccaacacagacagaagaaaagacattttgccagttgctacaacatcctgttgacaagaatagcagtggtggtagagaagcctcgttgccttaacggggctagttcctgagctccattatctagcccacgggttggcaaattttttctctaaagggcctgatagtagatgctttagatcctatggaccatacaatctttgttggaattattgatctttgttgtggtgttgtgaaagcagccatagacaatatgtgagcaaatgagcatggatgtgttccagcaaaactttatgtacaataacaggcagttgcctgatttgactgtagtttgccaataccagatctagcctaaccagtgatcctgggagctgagctacccaaaactttcagtaaattctgtttcttagatcaggtagacttggtttattttccttgccactagggtattcattcctatttccagacttcataatctaacttactatgtgcagaggccataaaatcttacctgctttatacagacacaaataaggactcctccattcagagagagtaactcttttggataaaatatggtttgtttttgattctctgcagtagatcatctttttttatttttttgagatggggtctcactctgtcacccaggctggagtgcagtggcgcagtcttggctcactgccacctccacctcctgaactgaagcaatcctcccacctcagcctccagagtagctgggaccatgggtcccaccacgccaccacgcttggctaattttgtgtatttttggtagagaagaggttttgccatgttgtccaggctggtctcgaacttctgagctcaagtgataacgcctgccttggcctcccaaagtcctgggatcaaaggcatgagccaccgctcctggccagatcatctaattcttaattgaactgccttctttgtccaaaactcttctggaattacacatctagaaatgctcccattcaaaacattattcccctagaggagttctttgtaccctttccccagcctcccccaatgatgcattctatatacttatagtgtaatatcaaaaccaagaaactgacattatcaattcacagactttattcagatttcaccagtttaacatgcacttatttgtatttactcagtggtgtttgtggtgtgtatgtgtatgtatagttttatgcatttttttcatatgtgtagatttgtgtgaccagcatcacaatctagatacaggacagttccatcactgcaaagatctcatatgctaccccttgatagccacccccacatccctaacctctagcaattactaacccattgttatttcgagaatgtcattatataaaggaaatcatacggtacataaccttttggtgctggcttgctttactcagtgtagctccccagacccatccaagttgtttgttcctttttattcctgagcagtattccatggtagggatgtggcagtttgtttatccgttcatctgttgaagaacatctgggcttttcctagtttggggctattacaaataaagctgcttatgaacatttgtgtacatagtttttgagtgaacctaagtttttatttctctgagataaatgctcaagggtgccattgctgggtcgtatagtaagtacatatttagttttatgggaaactgccagactattctcctttactaagcacgtgataactggaattggcagtgtttgaacagctcttcctgtctttcattttaccgtctttcacaccattatctggattaatttttaaacaaaagaggaattgcagttttcttacatgccagatattatactaagcaccatacacatactatctaatttaagcctcataacaactccccaaaggagggtcaataccattgtttctctaaagaaggaaactgagccacatggtatgtgcgattaatgagctagatgatcctgtaattgttcaggttcatccagctcattaaaagttatcaattggccgggcacagtggctcacgcctgtaatcccagcactttgggaggccgaggcgggcggatcacgaagtcaggagatcgagaccatcctggctaacacagtgaaaccccgtctccactaaaaaatacaaaaaaattagccgggcgtggtggcaggcacctgtagtcccagctacttgggaggctgaggcagaagaatggtgtgaacctgggaggcggagcttgcagtgagctgagatcacaccactgcactccagcctgggtgacagagtgagactccgtctcaaaaaaaaaaaaaaaaaaaagagttagcaattcaaactctgaccttggagctggtgctgcttttctgaaaccactgaatgtttggtgcccttgatgccttgagatgttcccttacgaagtgtcctgattgtgattgcggcctgtgaggcccgttatggcttgtctatctactgacactcccttgtacccatccgtgaatcctctgtcctcttgggttttatttttctgtcttgcttttgatatgcctgaagcccaagacaggctgcaacttcatgataagtggaggcttcatgtttgattaaaccagtcctatgcattgtcacctgagaatatcctgacagtggaattagtaaaggagactactgcagggtgttgtggacccccatggtgatgaagacactctgagattaaaataacatattaggagattcgttaacatagttgtccattcgttacccaggcaatccttgtttcattcataaggtctcatgactgcatcttagttggacttagcagcacctaacttctgcggattccctggcatccctccaggaccccattctttcctgccttgaatgccttcctgtgtttcacacataggcaccaaggatccaggtggaagacacctagcttgctcctaccaggctacacattttcacccgaggggaaatgaaaactgggcagcaaaagagaggttttcttttggaattacacatcttgaaatacctcagttcctctgtcctgagacaaaggcatttcattttttgttggcagctaaatgcagggtgtttgagtggggtgaccccaggctgatgcaccaagggaacgtctaatgcctgcacttcccaggctttctgctgcagaacacacactcatttggctgccatctgtaatacagtcagagagagagggcagacatttttctattaggttctattaccttgtattggaagaataatggcatgttgcttgaatgtttcccaagagaatgttttctgtgctccgtgtatatttcaaactccaaataagaaaagtaatgagggttgggggctgctggtgaggcaatctccactttaaagattctgatctttgttgaagcaattatttatttacatgaaaaaataatgccttttccttgagctgtctcaggaaatccaaaagtgaagaagcaaatagacgtttcatatagtatagcagtgtcaaagaacagtcatatgtgagtttattaccaaggttaaaaaacctagtgttaactttgggtttgtctaagtttgtttttcattgttacacgagtatgccggagactggttaatttattttacttcctccctccctccctcccttttcccttttcacttccctccctcccttctttccctccctccttccttcctttttctattttcttttaagagatgaggtcttacagtattgcctaggctggtcctgaactcctgggctcaagtgatcctcccacctcagcctgctaaagtactaggattacaggcatgagcccctgtgcctggctttggtaatttataaacaatataaatttatttctcacagttctggaggctgggaagtccaagatttaggtgccagcaggttcagctgtctggtgagggtttttctctgcttccaaggtggcaccttattgatgcatcctctaaggaagatatgctgtgacctctcatgcagaagtggaaaaacaagtgaaccaaacactatctgaagactcttttatatggttcttaatctcattaacaagggaggagccatcatggcctaattgcctcgtaaagatcccgattcttaataccatcacattgacaacacctacgttttggaggagacatgcaggcttcaaatcacagcagggctaaatcagcataatatgacaacttggatttattgtgttgagtataatgcaaggcactttgcttatattacattggctcctcttagaaataggttgtcgtatagatgcacagactgacacttaaagttttagttacttgctcaagatcatgtggctgatgacagggcttgaaattggtaaagccttggtttggggtttgaatcctgccttatgtccctgagctcattatttcaacagacttgctataatctgctggtggaaagcagaccatcaagaacatcttttacaaatggtagcctgaaggtcctaataaacagggcactgagttttactgctaaacctaataaggggagtctctggtttctctcgatttctccttgtccttaattcttccaccttttcttcccagaaggaaaaataaaacccataagcaccagggattaaaaagcctggtactttttttcccctgtacaaatgcagtgatacatattgaatgtgtgaaaaccagagctgtacacggctgctgagaaattatcttttaatacataagggttacaaaaccaaatcaaggaagccaagggtgggggcaccatgtaccttgatcctaaaaatgttgaatgccagcgaggtattacagaatctaccattgccactcacctaggaacaccagtgggaatgtgtagtacaagatttttgtggaatgagactcatgttcgaagaacacagtgacgagttccgcacaaaactgttgagaagcagccaaaaaagagctcataagagattgagtcccggccaggagaagggaaacttggcacctgattttattaggatgcaatagttatccaaccattggatgtgcctgcggttttcacagggaagaccgtagacctcaggatgataactgagtaagaaagaagttttgtgtttgagcccatgtgtttctaaccagagtgctcttttccatggaataaatgtttcctaacactagtgtgaagatttaatcaaatacacacttcctcatcaaacgcacagtcaacttttatcttaaaatttattaatgtgatggttttcattttcaaatgtaagcattttcaaacacttaattgtttaactctcgatttgcaaaatgagttttttggtgaaatgtgtcatttgagggtcttttaccactgtttggttttatagcttgcttttcttgtttactttatgatgtaaactaatttttactaccaataaaagttttaggaatcctatttacatgtgaacaatgattcagcaatttgaacctatattttttgctgtggagttgtctagtaaaagtttatatgactctgctgactctaatggctccgataaattacacatttatctgtgtgtatgtttatatttttttcctcattgcctacacttctagaaccctgttcatcaacctcaattacacgatgtatttggacactctttctcttttttttttttttaaaggaaaaacataatttctatatactaccagatgggtgtgttggctgtaagataaaaatcccaaaatacttaagagaccatctggtatcttggtagggtttagttgattaagttcttgtgtattgatttcagtctgagcagaggtaatcttatccctttggatctctacttaaagaaaaaagttgtcgttgacattttgtcccattgttaataatcttttttttttttaagtttcacaagaaaatactagtgatagatgatagcagccattgatttatatgctcacacagttgctcatgactagtggttgtttatcctgaacgggcctgatgaagccttagggctagacttagttcatgagacacagatttctttagaagatgataatgggtccatgtgggaattgacctggattcattggtgttgagcttgaagctaagcaatttccgtgcaccatgttggaagttttctgggtgttactttgtaggccaccagtgaatactgcacctctggtgtaccttggagagtgtcagaagctttatatatattgatccatgtaagtcatgtaagaatcaaatagccaggtgtggtggctcacgcctggaatcccagcactttgggaggccgaggtaggtggatcacttgaggtcaggaatttaagaccagcctggccaacctggcgaaaccccgtctctactaaaaatacaaaacttagccgggcatggtgacacacacctgtagtcccagttattcgggaggctgaggcaggagaatcacttgaacctgggaggctgaggttgtagtgagtagagatcacaccactgcactccagcctgggctacacagcgagacttcatctcaatatatatataaaagtaggccaggcgcagtagcttatgcctgtaatcccagcattttgggaggctgaggcaggtgggtcacgagatcaggagttcaagaccagcctggccaagatggtaaaaccccatctctactaaaaatacagaaattagcagggtatggtggtggatgcctgtaatcccagctacttgagaggctgaggcagagaattgcttgaacctgggaggcggaggttgcaccgagcccagatcgccactgcactccaacctgggagacagagcgagactccgtctcaaagtaagtaaataaaaaataaaatgaagaatcaaataaatagtgctctattcctcattctgcagatgcggagtgtgttagccattgacagggctgatcttcaagtttacctctgcctgactctgaaattagaatttcctctacggtgcaatctattttccctgatggccaggacacttgttgagctctttctttgggtcatggactgggctagggttaagggatattcagtggagcaaatgttccccttctctgcccttctagaaccttgttcctctagttacaatattttaatattgttgttaatgtttcttttcttatttatatttaagatacatcctcaggctcttcattttaaacagggattctcaaccttagcactagtggtatttttgggccccgatagttctgtgttgctggagctcttctgtgcattgtaggatgtgtagtagtattcctggcctccactcactggatgccactagcatcctcctaagttggaacatccaggggtagtcaaatgccttctggcaagtgggggattctcccctaatagagaaccattcttctaatgtaactgccagctatttgtcactgggtgaagggtcagaagcctgtttggcagctgcagaatctttgtatcaaaatgctatggagtggagatttacactacaaccaccagatatcatgggggtagaaattatgccaaacaacagatttgtattcattgcagaacattttataagtacatataagataagggaaaagtaattttttttaaaagtacttataagccaaaagaagagacaatttaaaaaatcatctcacaatgtagagatgaatgtgacttaatgtcactacatcctgatagttttttttttctatacatattacacataggaaagacgtattgtacatatagggttagtcaagacatcctgtctgtgactgatgttatgcaatctactttttcattttatattgtgaacatttccccatttctttaaattatccccctttttttttccagcatggttcataatgggtggcatatttgtctcctgttccttgtcatttttagcagctgcaatagtgatcctccataaatgggccagtgtctacttttctgtcattttaatgttggacattttatttgttttcatttttttttttgttctaaataatgcttttagtcctcacgtatttatgtacatgagactgtatgccaggcacccctgcttcaggtaccttggatagaacagtgaacaaggctgatccctgtcctcatggatcttacagtccagctgcgtatgtgtagctaaatcattgcatatgtctttgttttgttaggattcgtcgtgccctgccattttctcagatgtgttgtcccctgccctttcaactttctttgctcatcagggtaacctcttcctgtataagggcccagcctctatgaaagggaggctctagaatctgctcgcctgtgagattagaattcaccttggcccacactgttcccagttatctagtgaaatcagcatgaatcagaatctactagaagcagcatgtgtgcaggttgttaagcggggagcggtggggggcgcggggaactgtaagggaacatgtaaggctaattaaggtacatcatctgttaggtgtcttttttgtcctgtttttcatggatggctccaggggaagcccagtgccacatctgagaggcatagagggaacatgagatacatgcccttccagggcactttgactttgacaaattacctaatctcttcggacctcagtttactcttgtgccttatagtgttgtggtgagaaatgaatcgtgtgtgaatagcatttaccgtggagtctgggatgtgggagtcattcaagagaatggggctgctcttgtgctttaaccaacacctgcccgccaccccctgcacccatatgctagataattgatgtgcgttctcaagtcttcatagcacatttaggagatataggtggaattttgttagtttttgcttcatatgctttgaggctctgttgttaggtgaatatatatttatgatatcattcttttttctttctttctttttttgagacagggtctcactctgtcccccaggccagagtgcagtggtgcagtctcagctgactgcagcctccgcctcccaggctcaagcaattctcatacctcagcctcctgagtagatgtgactagaggcatgtgccaccatgctcagctagttttttgtatttttagtagagatgaggtttcgtcatgttgtccaggctggtcttgaactcctgagctcaggcagtccgcccgcctcagcctcccaaagtgctgggattacaggcgtgagccaccatgcctggcctataatataattctatcctgctttcttgtatgcagcccagggcttaatgggttgaccttctatgctgctgacaaaggaaggctacctgtgctttttctttttttttttttttttgagacaaagtctcactctgtcgcccaggctggagtgcagtggtgcaatctcggctcactgcaacctctgcctcccgggttcaagagattcttgtgcctcagcctcctgagtagctaggattttaggtgcccaccaccatgcccagctactttttgtattttttttttagtagagacggggtttcaccatgttggccaggctggtctcaaactcctgacctcaggtgatccacccacctcggcttcccaaagtgctgggattacaggcgtgagccaccgcacccggccacctgcgctttatcagcttattgaggtgtgcggcaggagtcctggttgcctggtgagtcatcctgcaggtggaatggttgagtcgccgagtcccctgccagattgtccagagttgtacaagggcacagtgctgcctctcaatgacaggaaataggtatgatttcctctctcttctttgtccttatttcatctctgattattgtcttcccagcatttaaccacatttgcaagttacgtttttcacttatttgttgacctgttcatgatattcattaatcctgtagattaagatcttcagggattgttatcagtttcacttattcttttatcatatggtcccaggatactgcctggcacatagtagatgttcagaaatatggactaaatgagtattataattgacacatctcagtcaagaaggagtggcagttatactcagttgtaactttttcttgaagatatgtatcttcaagttacttgtactaatgggtggttgcatattttggctcttttactttgtatttttttagaaacagggtcttactttgtcacccagcttggagtgtggtggcaggatcacggctcaccacagctcactcctggctcactcctgggctcaagtgatcctcctgcctcagccttccctgtagccaggacaacaggcatatgccatcatgcctggctaatttttaaattttttttgtagatataggatctcccaatgttgcctagactggtcttgaactcctggtctcaagccattctcctgtcttggccaaccaattgtgaaactgtgtctggcctgtttaactcttaagtgtagatgtaatttacttcatgaaagagtcagactcagtggcttatacctgtaatcctagccctttgtgggaagctgaggtgggaggattgcttcaggccctgagtttgataccaacgtgggcaacatagcaagacccccccccccccgaccatctctaaagaaaataaaatgaaaaaataagctgggcatagtggtgagctcctgtagtcccacttctcaggaggctgaggagggaggatcagttgaacccaggagtttgaagctgcagttagctatgattgtaccactgtattccagactgggcaacagagcctgaccctgtctcttaaaaaaataaataaataagaaaaacaagaaagggcttctttccttctgagtgtgtgagcatccctcatttgatgcagaaggtgaggtgacacagaagtggtctctgtctcagggattagcaaatttagtagggaaatgcctccatagcccccaatttacatatgaatagttaaaaactgaccgtttcataaaataagccctaaccaggaatgcattttaagggaatactcttgtgatgagtggatttccagagcaaagaagagacacagtctgagttaccagtgccaattacttggtaccactgcaaatcattcccctttggcaacattatttttaaaattaacttttaggaatttcttctccaagcgtattcttggttcggcattctaacagttcatttacctgattgcatttgatgggtctgttgggattctggaatgtcaattttactttttaggagataggttgcctgggtcatgtccaacattcttgtagattgaagatattttccttagcttcttgttctttgctttctggactcacatcctttagttgttttcgatttggggctactataaaaaatgtttttacttattctccagatattttcttccagccatatgccgggcccctttgtttcaggcacccaggatagagtggtgaacaaatccctgcctgcacagagctgacattctagaacctgtgtaggggagagaagattcctttcccttacacatcaaaaagttcatggctgaggcccccataacagattaacaagagaaaagcaagcatatttattgaatatcagttttacgtgtcacaggagttttcagaaatgaagacccaaagcaacggggaaaactgtatttttatggacagtggtgccaaagtatgattggaggacaaaggggtattattgtctaccggtaataaactgtgggggtggaggggagccagcaaggcttgttttgttcaatttcttcttggtgtctcacagaaataaggacgttcctttcctctgggcatgtggaggacctctctagaatgagggtgagactatgacctactttcaggggaaggtcagttaagttttataaccagtttcagggggagaagggatgagagaggaccagagagaccatcctgcttttgatgttctcccaaaggcaaggtgctccattttgaggccaggagtttggtactagcttgggcaacatagcaagagcccccgtctctacacaaaataaaataaaaaaataagctgggcatgatggtgagctcctgtagtcccactactcaggaggctgaggagggaggatcagttgaacccaggaggtgttctcaactctggcacatgcttgtagctgaattattgatgatgcctttgatttgttttcttgggattcattgtgccctagtgtctcctgtatgtgccgtccctcatgccttcaactttctttgctcaaaatgaaaccaattgatgataaatgaaaggatcagtaggctttaaagcagttatttacaactgagcatttagagttcccacgcttaaaaagtgggagctgttcccatggctgctgagagtgctgcggaagctggttctctttgtccttaagttgatcgatagcaggcatcagcggggaagatgctttgtactttgcttgttaaacagagggctgctaagcagctgtggcagtgtgaccctggttgtgctgctgtgggtgacatgagtgtgcatgtggacagtggttatggtgcttccctacacactgggcacccaccctatggacagacacactccatgaaaatgtttgggaagtataagagctccaggccatgggatgaaatgggaaggacctaactctgatttctagatttggaattgaatctgcatgtactgttcaggtcattgttctggcacatatttgacggtttggttgtcttcaagctcaggggctgcgaaagttgccagaataggaatgttctggcctgatgcaagcaggcacccggtgcctgtggattcaggactggtcacactgcagctggacattatgaattcagatgtccctgatgagacggtgtcctaggacagtggctaggtgaggtctcaggatctcaggtacaaggttagaggaggcaacgtggagtcacagtggagagcctggttggtcccatagccagatagctacaggttcaggtaccagctctgccctcatctattttttgtgaccttgggaaagttagataacaatttgagctcctttttctatcttgaaaatagggatctaatgtctaacttagctccctggtgttttattctccccatctcatccacatcacacttttattttcaagtcttgttttctttctgtcatttattcccgagataagtgtatgcttgttttgttgtttattttcccagctaggatacaagttctttgcgagttaaggatttgattggtcttgttcactgctctgtctcagcacccagcacctactaggtgaagtatttatagaatgaaaggatgagtttgctagacactcatggccatgatctagtgctcccaggtccgtattttttggccaaagccagaaaaagaccatcttcaagtagaaacatagttatacgcctgtaaaaatttgacacattatagattctggccaccatgcccttggaacttcacttctgaatctgtgttcagaccaggaatgtagcactggttctcatggcttgctttggaggaagtctttggaaatttttgctgatagccttctacctaggagcatgagttcggctgttttctcctgcccctgcccctgcccctgcccctgttcccctttttggacagtgcccaagacctagcagacacaccttggggcccctctagcctgaaagcctttggtaatccctgcttttaagggccttttgccatggcctgatgaacatcagacaggatgctgatggttttattcttgtagctccatagccgtcagcctgaatagatgttctcagggcttcatataggcatatacaatgtatgttttctttcatcgacaaaggcactgatggtgcaagtccaaacagtgctgctcagttgaggattttcttgttcaattttcgggagctcttgactgactgcattctgcttcactggagaagaagatagtttgatgaggctgtgtacacttcttaaaagtgaaaaagcctttgcaggtttgtccagacagtggggtgaccaggaaggagagtcagaagagaaggtaggggtctggatcctgattttgagtgttcatttcccaaaaaatcttaggaagataaacactttcttggtaacctttgagtgtcatgttccttctctgaagagtgtattagattccatgtggtatacccagtagattgcattttgagtgtcattgatgattaatggatagagactgcttagaccactgtatggagaaggattctgaagtcatgtctgggtgcagtgggagagtgtcatgatacattgattattacttttcataaccgatttacctaaaccaaataatactagtttttaaattcctggatgtgatacacaatttcctttaaaaataaatttaattagaagaaatgaatggttttttttaaataaggaaaactagagtttttcagggggaatgtggctatggtggaaactttgaacatagtatgagaaagaatgaaattctggccgggcgcggtggctcacacctgtaatctcagcactttgggaggccagggcaggcggatcacgaggtcaggagatagagaccatcctggccaacatggtgaaaccctgtctctactaaaaatacaaaaattagctgggcctggtggtttgtgcctgtagtcccagctactcaggaggctgaggcaggagaatcgcttgaacctgggaggtagaggttgtagtgaggtcagatcatgccactgcactccagcctggcgacacagtgagactccgtctcaaaaaacaaacaaaaatgaaaaaagcacaaagaatgaaattctggaaacactaaggagatgaatgtttacctacctgacagaattgttttgggagttttaatgcaggtggcagcttgctgtgacttctaaaggcagtacagaagtatcacagtgtggttaaacttctttttttgaccaggaggtaaacctgaactcaaagtctcccaaagccctctctgaacaagaaaatagaatagtggtccagagtttggatactgaggctggactgtctgggtttgagccccctctcgcctctgttcacatagttagcgagtgatatatgcatttaacttccctgagcctcagtttctcatttgttaaaggcagtacctcatggtgttggtatcaggattaaaagaccatttcagaggaagcttctagaacagcacgtggttcagtataacacggcgtctacgggttgacaatgataatgatgattggatattaaaaaaacctgactggatgcgttggctcacgcctgtaatcccagcactttgggagactaaggtgggctgatacctgaggtcgggagttcgagaccagcctggccaacatgttgaaaccccatctctactaaaaacagaaaaattagctgggcgtggtggtgcacaccttgtaatcccagctactcaggaggctgaggcatgagaatcgcttgaacctgggaggcggaggttgcagtgagcccggattgtgccacttgcactccagcctgggccatagagtgagactccatctcaaaaaacaaaaccttacacaatttaatacattaaacaggtttggacactttttccccccctaattaaaaattttttttttttctttaagagacaagagtcttgctcagttgtccaggctgagtgcagtggcatgctcctagcctactgcagcctcaaactcctgggctcaagcaatcctttcgcctcagcctcccgagtagctaggactacaagtgcatgccactagcccaggctcccctcacttaaaaaaaatgggtgcttggccttacaaattgctgagattactctgtcatcttactatttttataaaagtttccttttttttttttaaatttttaagagagaagtgatttctgagtgaaggaatagcaaaccttgactgtggtgaatatcttatttctcctttagtgtctatatgcccgtttttatgctgcgtatatcttatttatctggcttcctaggcagtttagaatatgtaaagcatttatgccactgaatgttttttagaattatagcatctttagtgaatgactgtacctacgctgagccattttatcatgctataaataccaaaaaacactagaaattaaagaacaagtttatttcatttttgtatataaattctattccttttatttttaacttggataaagagctttgtttgtttgtttcttaatcacttctcttttctttgtagtgagtaaagaggagatatcaatttgtgtgtagatattagcattcttatataacagactcagccctagacacataaaacaccagcacctactagctggtgttgaaatgtgtggcaaagagaataatgattttgatttacaaatacttacctgtcaagaaacaccaccaccacccaatcccttactgtttcttttcagaaattaataatttaaattttaataagcaccaggcttaatgcctcatcaagtattttttttctttattatttatacatgttggtgtagctagcgtgttgactagcactggttagcacactaacaaatagaaaccaacactatactcaccttctaggttctaggtttatagttaattaacccaagttctcctgaagaccagatttcttcttgtcttggaaggggttagaaggtaatagtcatttgaacatatgtccacaaaatcttttttcagaaactgaggtttaattgtcctcctattgactatgagctagacttcatgtctcctgatgaacataataaggttgaagtgatagtgactttagagacaatatctctaaagagactttctgtcttggataactttgaggaaagccacctgccatgttgtgaggacactcaagcagccctgtggaggggcctgtgttgtgaggaatggaggcctcccactgatagccatataagtaagcctggaagtggatcctctatcccagattaaatattcagctgactgcagtgcagccaacacttgactgtaacctcatgagagaacctgagccagaagcaagccaactaaactgctcttacatccatgccccacagagcctatgagatgataaatgtttgttgttagaagccattacgttgtgggataatttgttacacagtaatagatcactaatgcacaataatggtgggggtcagatacacaggaacaaactgaatccataagaagatgatggtccttggcatgcccttggaatggggtccaatgatgttgcagaactaggtaaggcctttctaggggcagaaaagggaatgttttggggttagatttggtacttagcatcaacaaggaagatctgttccagtagcattttaaaaaggcctctcaactaagacttattgatggtgatggtgcatatgtctgtcggtctgcggaaatgcaggtgagcaagggaatgcagaacagatgcagagtatacacataggcgtctgatgcaggttcaagtcgagtagcttccgatatgactgttttctttagttttcacaaccattgaaaagagcaggccaggtatggtggctcacacctgtaatctcagcactttggaaggctgaagtgggtggatcacttgagcacaggaatttgagacaagcctgggcaacatggcgaaactgtctctaccaaaaatacaagaatcagctagtctcataacccggtctcaaaataaataaaaaataaaattaaaaataaaagagcaatgtcgttggcatcccattcatgtttgggaatggaatctgactttgccacttggaagattgtaatctccatgaaggtagggacatgtctgtattatttactcccaaatgcctggtgtcacagaacgtggaaggttctcagtaggtatttgttgaaataataaatgaatatcattgtataattttgagcagatgatacaatctttttaagcctcaatatcctgctctgtacagtggggataaataacccctaacttgcaatgttattgtaaggcttggagatagtgtattcaaagcagtagtccccagcctttttggcatcagggaccagttttgtggaagacaatttttccatggaccgggggttggggggatggttttgggatgagtcaagtgcattacatttattatgcgctatatttctattattactatattgcaatatataatgaaataattatacagttcaccaaactgtagaatcagtgggagccctgagcttgctttcctgcaactaagcagtcccatctgagggtaatgggagacagtgacagatcatcaggcattagagcctcataaggagcgggcaacctagatccctcacgtgcacagcccataatagaatttttgctcctatgagaatctaatgctaccactgatctgacaggcggcagagctcaggcagtaatgctctcttgccctccactcacctcctgttgtgcagctcggttcctgacagggcacggactggctgtggtctgtgtcctgggggttggggacccctgatttaaagcacttacacagtaggcaggcatgtatttctcagaatcctcagaatccattcttgttatgatggtcagagaacgaatgtgaagttttgatcatgtactttctgttttggcagaattagccttggtaattcagttccttaagttgtgagtgatgaattcaagaagtgaactgttggattttgttccacatctggattgtattaagtggattattgccaagttcccactctacatgctccttgtagtcaagctagtgtcacgcccctcgcatttttaagaaggtaacattacagttgtgagtcatagttacccagcaggaagccacattcctgggactcaactgatggggtggctgagcccagagctcttggtctgatgggccatcactccttgtcttataatcctcagtccaagagcatgacagaattatttctttctgtcactaagattgttgcagtaaagtaacctagtataaatctggatattctgtaaaaacaattcacttctacctttgtgctgtaaataattatgagcattacttttggcatttaaaaatgcattgtaaaggcctggcgtggttcacacatgtaatcccagcactttgggaagccaaggctggtaggtcactttgagcccaagagttccagaccagcccaggcaacatggtgaaaaccccacctctacagaagatacaaaaattagtcaggtgtggttgtacacgcctgtaatcccagctactagggaggctggggtgggaggctcccttgagcctgggaggcggaggttgcggtgagccgagatcgcgccattgcactccagcctgggcgacagagccagatcctgtttcaaaataaataaataaataaaaataaaaaaaataaaaaagcatttaggaagatattgagtagtaggaagtttttgtctgaagggttatgtgaaatttaaggaactggacatcccctgttttggttcagaatttttcttggaaccactagcaggtggagttttctgataaatcttactgtctctatcagtgtcacccctgtttgaataggaaccctcacaagaggatccatgtttatgtcagattttattctgtcccattttgtgtagctgggctgtgattcaaggtgaaattcttaggaaaggaaatcttgtgtagtaggtaggggctaatcttcaccacacaagctcctgcctttctgccattcagaagtagagacctagaagagataagaaatggggagctaagaaatacattgctggccttctgcagtactcgcctatcagtattttcactgtctcttcctggaagtatcgttttaaatctattgcacaaagtcagacaaataggtttatttgagtcaatgatttttttatagcgatatggcaatgttttatggaggctcagagttatcttgcaagtctgggccaagttgtaacttgaaagaaaacccaaagctaagatggtgaattgtaaataaatacacacacacacacacacacacacacacacacacaggcacaaatatattgaagactttgtttttctaggctgggttctggtaaaagggttcatgcttgtaattcctgcactttgggaggctgaggcgggaagatcattagattgctggagtttaggccaggctaggcaacctagtgagaccttatctgtattaaaaaaagaaaagaaaattaactgggtgtggtggcatgcacctgtagtcccaactacagaggatgctgaggtgggaggatcgcttgagcccaggagtttgaggttgcagtgaactatggtcatgctactgtactccagtctgggcaacagaatgataccccatttcttaaaggaaaagattttgtttttctaaaaatgaattatggatatgaaactcttttagttggaattttatgtatgaatttgagaggtccagaaaatgaaataaaattagacttatattggaaaggattagaattctagctcttaacgcctttttactttttttttttttttggccaagtaaaatggctaattatactgggaactggaaacaggtggctgtgtatcttagtaaataaagaacgatgttaacctctccagaatgctggtgactattgagtttggccagaaaatcctataaaggagaaagagttgcagagtgtaataaactcccagatgctcgataaaaacctctgttcctcttatgccggctggtgaagatcaagggcgccgcagcagagctgctgaaggctccttactggtgtgaaggtgatgagatttctcttctgttatctgtctgaattacttctgggcttgacagagatgggaactctcatttgatagcagttcacagactttggatatcttatttcccttaagttaaacttaccagtcttcatttgccaaataatttccccttctgggaagggtgtgtggcaaatctgacaagcttgtgttcagttctctgctgttactatgaggctaggggacttggagcaggcagcctagcctctctgtgccatcttttcttgcatctagcaatggaagaaaggaaaaccagcctttgtagggttgtgatgaaagtgaaatgagatgataaacaccaggtacctggcaggtggttttactgtcgctggttttctcaaaacctaaggcagagttgctgaaactcagcactattgacattttgggctggataattatttgttattatccaaaggttattacccagcatctgggaggaccatcctgttcatcgtagggtgtttagtaacatctatcctagatgccagtagcacactcatcctctttgtaataccagagatgtctcaagagtaatttgtttctgaccactgacagaagcctacttaagaaaagctgacagctgatgtcaggtgttttctttgttcaaaaatggtgtagaacagtacttggagtgaatgggtgacttcaatttagtaattgtttttacatttagtaaagaaattatgtaatggtagtgtctcctctcccttacccccccaattcatttgaattaataatttaaaaagtacttttaaaacttagacccagccatctgttccttcctgttgccttacagcagcagtaattgctttaggatgggcttggaaacaagagcggaaatggtctccagtgaccccaaatcataacagaactcgaatcctaagaaaaaccacaagtggcttatgaataagctgaaaacttaaatgcctcctcaacaatttaaatttggattgcatagcttatggatttggtgggacattctaacctcgatgtatctttaacattttctgcttttaagatgcaaaggcgttaacatagggatggagagaaaacttccttctaagttttcctagaaagtctggcacctttgacatagctataacagaaagaaaaatatatatatgtatttgatactggttctagataatgccattaattagatttaaaatgatgcttatagcaagcatatgtacaacgtaatatgttccagctacgactctaagcacttttcccattttaattcacttgcttctcagaacagttctatgagggaggctctattaggcctgactcatgctcggcattttgtacacgaggaaactaaagcaaggcaaagtcgactgcccagaattaccggctaataaatgtcagtcttgcctggtgctgcacacctgcagtcccaggtacttaggaggctgaggtgggaggatctcttgagcccaggagtttgaatctaactgggaaacatagtgagactttgtctctttaaacaaaatttttttaattaaaaaaaaaaaaaaagtcagtctggctactagtcttttaagtccattctgctgattctaagacttgatccacaagaccagggattggcaaaccatggcccatgggcaaacatctggcctactgcctatttttttgtaaataaagttttattggtcaaggtgtaggggtgggaaaaaagttttattggaatagagcccctgctatttgttgacttattgtctatggctgttttcttgctacaacagtagaaatgagtgtttgcaacagagaccatatggcttgccaagcctaaaatatttactgtctggctgttagcagagtgagtctgcctacccatacagaagaccattctcatccatatgtatagtccagaaaggtaggaacaaatttttaaaaatcttaattccatatactttcaaataagattgagttaaaactcatacattgaaggtccaagtatttggtgccattctccagtgttatgatgaatgtgaaatcatttacaggacacccctctatcaggcatttgggggaagagaaaggaacagataaacatgtgaaaaatgggagagtgtgtgaactctctatagtactctagaaagcccggctttaactctgcaaaatttgaaaatagcaatcttaaactttctgtttttctcgctgcttttctgcaacagcttcagaatagaaactgacaggcccattttagtagaaagcaaacggcagtgtgtgggtggcgccttataacacagcaactcaaggttaggtggggggagaccaagaattgagtttcttttgttaaatcagaaattatgcaaattttacaaaaagtattagaggaaatgtgtaaggctttaattggttttatgggtttgtcgcttttttttaaaaaaggttactttgtgaacattaccctctgctgaacatgtagacacttcctgaagtttaatgagatctcagagtagaatcacaacaaatgtgactctcagatattttcaagagatggtattatcttgggctgaaagtatgttacactaaggctgtcatttcttaggaggatttactctaccacacaagctcctctatctgaaattatgatgagccccaacatagagctttttgcttatactaaattcagagaatacttagtatttgctaaatcagtggtggcctactttttaaagctcatttattacactgaactttagataatatagaaatgctttctaattacagttttgtcccctggtaaaactaacactgtgcattgcgtttgtattattgacattaccttctagggccttgagtgaaggatgctgagctgcgctgctctctaggattggttattttaaactttgatttttgcttgagagtggactaaggtagtgtagttaaataaaaagtatgagcagaagtgtttgtttcaggcaagattttttcagggcctcatttccagtggggttgatggatgatttttgtggcttagagcttgagacattatgagttgttcaccgagacccagaatcaggtcagaggactgactccaaatactgtaatgtgcttggatgctggtaccggtatcaagaggctcagaggaacattggatgtgtctgtccctagtaatgacagcacagtcacagctggtctgtggcttaacagtgtctgcaggggcatccattcccatccctcttactccttcttacttctcttcctagactttactgtctctgttaattacagttccatttcagatagagagttaattgatttaagtttatgactggacccccgtgcctgcagtgtattgttgaatgaatggatgttttgattttttcttctcctttgaagcaaggaatttactgcttggaactatgctgcacaggtttttcttaacgttctgtaggatacacattactttttctactatgtgtcttttattgctgcaaaagtcagttgtacttgagacagtttggcactgagaggggaatgtggcatatcttggcactgtggacagctggttgggtgttgatgtggtgacagggaggagggaagggctcacagaccagacacgtgctgcctttgaatgcaggtggtgatcagtgtgcttagtcatgtagggctgctcttcgtggaagaggtagcttggtagggtggttgagtttcagtactggagtcggcagaactagacttctgtccccaccctggctcactagctgtttgacattggacaccttgattcaatccctttgaacattagtctccttgtctctttgatggggataaatatctgcttcacacatagccctgtgggaagatgtgaaaagcccaactctgggtgtgttaggggcagataaatgctgagtgttagctttcctttagccgaatctgaactgattgaattgcattgggactcagtttgtagtcagtgacttatgttcaaaaacttgggaagacccaggagggggttgacttatcccgaaaaatcaggttctttttgaaaatgtgttaattctttcaggccagcaaggtgtcatctaagaatgtctgccagtaactagttcccagggagtcttaaagatgtcactgtagctttcagacatacctgagttactcttaagagcaccttgccttgtaggaatccattttgtgatatttgtttaaattatgtcacagcgcattgcagacttgtaatctgttttcaaaatggtattgtctgcgcccttattgatcagcgcgacatcttttacttgcttatctctgctttccatatggtcatactccaaagctagacctagagcagacccactaactcattaacctctctgacacgaaatagaaaccttctagaaggggaccagctatgggaggcagagttcttaaaatctctcgcagtcccccggcattttcctgagcctccggttgtaggtattagactgggcgcgagttttcacaacacggggaatttgtcatggttgagtctgctgtcgtttgaaatactgcttagttctttaagatataattaagtagaatcgcagaaaagagaccttcgttggcattttttgtttgtgttgtgactatcgaaatccctgctctccggaggcttgccctgacttggggtggggagtgtgacgtagagacactgcgaagccggagcgatcaggttaggtgaggccatgcttaagttggattcgttgaaaatatgattcaatttgagaacatggtagtgcccatttccaagctgtcacagagtccaggagatggggaataaaaaatcttcggcatctctcggggaagattattttgtttgaggtcttaggacttctcctgatactgtatgaactttctttttttttttttttttttaattgatcattcttgggtgtttctcgcagagggggatttggcagggtcacaggacaatagtggagggaaggtcagcagataaacaagtgaacaaaggtctctggttttcctaggcagaggaccctgcggccttctgcagtgtttgtgtccctgggtacttgagactagggagtggtgatgactcgtaaggagcatgctgccttcaagcatctgtttaacaaagcacatcttgcaccgcccttaatccattcaaccctgagtggatatagcacatgtttcagagagcacagggttgggggtaaggtcacagatcaacaggatcccaaggcagaagaatttttcttagtacagaacaaaatgaaaagtctcccatgtctacctctttctacacagacacggcaaccatccgatttctcaatcttttccccacctttcccccctttctattccacaaaaccgccattgtcatcatggcccgttctcaatgagctgttgggtacacctcgcagacggggtggtggccgggcagaggggctcctcacttcccagtaggggcggccgggcagaggcgcccctcacctcctggacggggcggctggccgggcggggggctgacccccccacctccctcccggatggggcggctggccgggcagaggggctcctcacttcccagtaggggcggccgggcagaggcgcccctcacctcccggactgggcggctggatgggcggggggggctgatccccccacctccctcccggacgaggtggctgctgggcggagatgctcctcacttcccagacggggtggctgctgggcggaggggctcctcacttctcagacggggcggttgccaggcagagggtctcctcacttctcagacggggcggctgggcagagacgctcctcacatcccggacggggcagcagggcagaggtgctccccacatctcagacgatgggcggccgggcagagatgctcctcacttcccagatgtgatggcggccgggaagaggcgctcctcacttcctagatgggatggcggccgggcagagacgctcctcactttccagactgggcagccaggcagaggggctcctcacatcccagacgatgggcggccaggcggagacgctcctcacttcccagacggggtggcggccgggcagaggctgcaatctcggcactttgggaggccaaggcaggctgctgggaggtggaggttgtagcgagccgagatcacgccactgcactccagcctgggcaccattgagcactgagtgaatgagactccgtctgcaatcccggcacctcgggaggccgaggctggcggatcactcgcggttaggagctggagaccagcccggccaacacagcgaaaccccgtctccaccaaaaaaataagaaaaccagtcaggcatggcggcgccgcctgcaattgcaggcactcggcaggctgaggcaggagaatcaggcagggaggttgcagtgagccgagatggcagcagtaccgtccagcttcggctcggcatcagagggagaccgtggaaagagagggagagggagactgtggggagagggagagggagagggagagggagaagagggagagggagagagggagagagagggagagagggggagagagagggagagagagagggagagggagagggctcttaagggtccatcatgttttggagtctaaaagttgggacccggtgtgggggcacaacacctgcaatcctagcaccttgggaggccaaggcaggaggattcttgattggcccaggagtttgagaccagcctgtgtgacatggtgagactgtctctgcaaaatataaaaaattagctgggtgtggtggtgcgtgcccgtagtcctagctactcggagagactgaggtggagtgtatcactcgagcctgggaagtcgaggctgtagtaagtggcgatcgtggcacctgcactccagcctaggcaacagagcgatactctgtctcaaaataaaatggaagaaaaaagataaaacaaataaataacaagctataagttgtccctgcatgtaaaacaaaaattgttcctgcatgtgaatcacagtctttgcgctttctggaaagtaatagaaatttctgtggatgagccacttggcaaaggttatttctaaaactctgtgttagagatttttggtaaataacaaagagcctgaatggtcccatgggataaaacaccagctcaagactttacaaagtggggctctcattgaggtagttctcagtctgcaaaatgaagatgatacaccttagatggtatatatttcaatgctattattattgagagccagtttggcattaggcatcacactgagtacaaatttatttctacatgttcttcttttaaaatatggaattcttttattattgtttgtactagtttattattactgtttgtataaatctatgcaagtacaagtgcaattgtgttacatgcatagattatggagtgatcaacttgggacttttagggtatccaccacccgagtaatgtaccttatacccagtaagtaatttcttatcatctaaccccctttctgactattgaactctgagcaacacttgactggattgggaggattggagtaagaagaatgtacattccttatgttaagatgtggtaggaaatagaaacttggctttgtccataaaaacgtgtgagttcatgtccttttcaggaacatggatgaagctggaaaccctcattctcagcaaactcaggaacagaaaaccaaacactgcttgttgtcataagtgggagttgaacaaagagaaaacatggacacatggaggggaacatcacacactggcgtctttgtggggtgggtggggtaggggagggatagcattaggagaaatacctaacgtagatgacgggttgatgggtgcagcaaaccaccatggcacgtgtatacctatgtaacaaacctgcacgttctgcacatgtatcccagaacaagtataataataataaaaaaaaaaaagaaacatggctttgcatgagaaaagcctattgaatgtctcagagatggacatgttaatgttgccttgagtagaaagatctggatactgatctccagctccccgctctttcagttttggattctactgttacctaatgtgtttaaagccatattggttagcagggagtagtgatcccagctactcaggaggctgaggtgggaggattgcttgaacccaggaggtggaggctgcagtcagctgagatcgccccactgccctccagcctgggcgatagagtgagactccatctcaaaaaaaaaaaaaaaaaaaaaaaagccatattagtactctataaatactccattaaaaaaaggtgggaggtaggagacgattccccagttgtccaaaaaattcgattgatgtgctgctgacttctgtttggtttagcagatgtttgttgagcagctgtttgttgaattggttgaaaatgaattaaaaataattttatcttgacctttctctttgtaactttaacatcacctcatgaggtagctggaaaagtcctggaatgtctttcaaactctgggtgggaattactgtttacaagttgtcagccagtgtcactaggtgataattcccctctgtgtgagtgtcatggttacagtatgcttttttgcctctaaaagaacaattatattcaagaaatttcctagtgcatttaaaaacagctgggtgaaagtcattttaaatccccaaatccaacacattcgttcttttgtgcatttaattaagcagaagttaaaataaattagaacaggagacattcagtgctgattgttgaatcaacaaagcaagaaacagcctagcattaccctaccacagatgtctgtcactcagtgctgttgccctataaatttccatcaactcttaccattttttgaataacaatttcttttctagtaaaaattggcatatgatgtatagcaagcaatattctttatgcaaatgatatttccatatatctctaattttttccccttaatgatacatttatgttggtggcttggataacttttccggaggatggaggatgtgagatgggttaggctagaatggtaaggtttaggaaaatatagaaaaataagatttagcagtaaatttgggtattattagtggaagtcatggttgaggttgtttcatttatgatactaaattattttaaggacatgttaagtttaatttgtctttataatgcaagtaatatatggttcatgatagaaaaagttgattaaaacatatcagccagaaactgagtcccgtatttttctcacccacaggtatcactgttagcatttctaggtaaacagtcttttttccccctattatgtatgtacttttggctatcttttaataacaggattatgcttcctaggcagttgtatgtcttttttctgccatttagtagaatatcataattgatatggtatttgatgttggcttctaaataaccaaggggagaggtgaggcctatggctaatgtttcagctgaaacaaggttagccctaagttgaggatagtttttgcagatgagtaatgagggtttattatactgttgcttttgcatacattttgaattatctttcctaaatttttttaaagtgttcagtaagccataaacatctccccagatctacacattcacaccaatgccattcttaagaggcatgtgtcattccgtggtagcatggatcatattaataattgaaccagtatcctattgttagatacgtctgttctcagttttttcgaccattcttggaaatagaggaaaatttgtccagtcatttatttaagaaggcatttgtaagttaaatttttatttatttttcactacccaagaaggaatctggagttacagtaacagaagatactggctagtatttcgccttagttaacaaaacaatcatgaaaaatctttgtttagaaagttactaaagtctaggcgggcacagtggctcacgcctgtaatcccagcactttgggaggctgaggtgggcagatcacgaggtcaggagatcgagaccatcctggctaacacggtgaaaccccgtctctactaaaaatacaaaatattagctgggtgtggtggcgggcacgtgaaatcccagctactcgggaggctgaggcaggagaatggcgtgaacctgggaggcagagcttgcagtgagctgagattgcaccactgcactccagcctgggcgacagagccagactccatctcaaaaaaaaaaaaaaaaaagaaaattactaaagtctgtgaaattagtacattttctgaatacttcactgtaattccagtgaatattttactttcacacacacacaaacacacacacaatttagtgtatcaagtaatttttattgcccgatgtcttggcgccttgatatattttaacgtgttgcggttgcatgtgactcttccaaagacatctatcgggaaatggatagttaatgcatggtgtgtatctctctgttgtttatttaccataagttactaattcccatttctcagctgagagctattataggccttcctctcatcagggatagttggagccagataggatagagattgggtaactgttggaatgtggaccaccaatttcttttattggcttccatagctagttagatggagactcctgacctgagtgaggagtattatctgtcctgtgagcctccagttagcctgggtaaaaacaatacattaagaatcactacctcttcttagccaagcatggtggctcaggcctgtaatcccagcactttgggaggctgaggcgggtggatcacaaggttaggagtttgagaccaacctggccaatatggtgaaaccccatctctactaaaaatataaaaattagctgggcatggtggcgggcgcctgtagtcccagctactcgagaggctgaggcaggagaatcgcttgaacccaggaggcagaggttgcagtgagcccagatcgcaccactgcactccagcgtgggtgacagagcgagactccgtctcaaaaaaaaaaaaaaaaaaaagaatcactacctcttcttatgtatgtttagtgtgggacaggtgctgtgttatacctggcacctaccttaaacaactgaatctttatgaaggccatcagaggcagtctctcttattcttcccactttacatgtgaggaaacgaggcctagacagtgagagaaactaacttgttcagttaaagttgcacagctagatatagattttttggacatgttaattaaccctttcagtggcttggatcacgatcccaataaatcagtgatgaatttttggtagatgtatatttacttattaattataatgtgtgcatataaaagccatagatctaggcctgtgattaaaacctgcccattgcttatgtgtctaaaagttccttttctctctgtgctgcaatagctaaattttgccgattttctattttctgttcttactttgatttggaacaaaccaagcttcaaatgcacagggtcccagagtggtagagtggcttgcttatttgatatattttttaagctagtgatttctggaaatcggcagcccctcttgatgtggcacacctagaccataagtcagttataaagagtccttaggagtgttgggccgtggatgggaggggaagggaagtgactggtacagtttcaaaaggtagcttgtgtacaccccttcctcatgaattaaaatttatgaaagctgtttgggaaattcgatacccagaggtgcagacaccacatttggtaacacaacatgctgtgtgcagaactggggcagagtcctgatgttgggcagatgaggatgttttatcatcattagacaaacagtgccgtgaatgaggggctgtggctgggatcatccagctcagctcgtgctgtttccagtctcataagcaaaccaaaggcatgcgtgtggctgccctcccgcaatccaaaggaagatggaagatgaatggaaaatgactgtcgttctaaaagacacttgaaaactaacagctgggaaaactgttctgaatacttgaaggggtagcccgacgggtttaaaaaaatgaaggaagcgatagatattcatgtgttgtccagggaagaaatagtcaacatgtgttttacaatgtctggcgtagttgtctagtctttacaagtagaggtgtctgaatacacagcaggggagtcaagaattcggaggagtcgggtggggctggaattgacgggaacaacctgatggtatctccccacattcccttcttatttggaaagaagtgcagtccattgtagctgtaccctctgtctttgcatctttgatttctccagctcggagcatccccagacaagatggcctcatccctggtaaaaagttccctggccgagagatcaacgtgaatttcccatcctggcttccaggcgtctccgcttggcatctcacatttctagaaaaacagcacccaacctacttcccagacgtgtcataatcatgtcccattttgatacttattatacaaataaccccaaacacgtgtactctttctattggttgtttgtctaaaactttatttttgttctccaaaagtaaatgcccattgtaatacccaatagtctctttgaatttgcatcccccatacctaagttttgggaggcctcccaatgctcacccctcattagtatctctgtattatgtgcaatttttttttccttgaaagcatttctgcaataatggctttttttccccccgttaagtgacgacagtcatcctaagttaagtttatttgactaggagagggaagaatattcacaaagggcactggtctcacgtgattgagagactggtagaaacatggcaagattgggccacagtcaaatcagagtctggaaagcttgctgcctcagggatggctgtacatacaaactcccaaatgatacattaattgattttgattatatgactccaaagcttgagcatttcaaactgttttcaaactaatggccatcgcatttggcaaggagcccaactgcgcattgggttcattataaaaggagatcttgacagcctgtcaggaggacagaatgcatgctagggttttgagaagttgctcagtttcagaggacttggtggtgtttttcattaaaaggtaccagaaatttagcagcccgaccaagagccaggcttataagtcacggaatgaccctggtcagtacatgcagaaccttaacagtatgatcttaagatatctcattagattccagtgaataaggccaggtaccgtggctcacgtctgtaatcccagcactttgggaggtcaaagctggtggatcacttgagtccaggagtttgagaacagccaccacagtggaaccctgtctctactaagaatacaaaaaattagctgggtgtggtggtgcacgcctgtaatcccagctactcaggaagctgaggcacgagaattacttgaacccgggaggtagaagttgcagtgagctgagatcatgccgttgcactgcagcctgggcgacgagcgaaactctgtctcaaaaaaccaaaaaaacagaaaagcaaaaaaaccccacaatccagtgagtaagacctcagccggcctgaggttcacagggtttaaatggaatgcagtgggaagtaaagagtgatcccaaggagaagtaaaaatcttgacaccttactctcttcggcttgtcccacttttcttcaactgccccgctactggaacattttctctttctcaatttcgattgtccccttaagcaatttactaattagacattaaaacttcctattctctcaatcccaaagcaaaactgatgagcagagcaaaccagagcagttgggccagaacagaacaaagacgtacctgatgcagggaattgaagccagacccaaaacgggcaacccaataggatggccatctgccccattaatgccagcttgtccaagtgtaattattaacagtgccccctttcactctccaaagagtccctgtccagacagttaattgtgaagtcgccttcagatggctggcggtaaggaaagtagagtgagggaagcagggtaggtggaggtgtgaaagggagagggcctcatctcagggtggctggacctgcaccagcatcggcctgcatgaatgtgctcctactcttgcccaggctgagtatcaagagaagcaagaaatctagataaaaatccaaatccagaaacatcagcgttttgaggttaacatgttggcaattattcagctttatgaaaaaaaaaaaaaaaaacacaaaaaaacagcatgggagcctggcaaaatatgtgggtgacccttggctacttttgaatgaagtttttcattctgtccttcaaaaaaaaaaatcatacaaaaaaaataggagatcaagggggaaaaaaaaaagagggcatggaaaaaccagcctctggtataggctttcagggtatattggtgagcaaacttttcctagagctgtttctggttatcaggtgtggtacaggttgcagggaggtggggatggggatgactagggtcacagcaggcaataactagggttattggcacccggttggtgtttggtgcctgctgtgtaacttgctgggtgttgggaacctgtatatggcatatgccatgtgcacagtgggatgtgtttaaaatgtgggagacaggagctgtatggaaatcattattttcaaatgcggtcatggcttttaggttgtgaatttttgttcctttccaaaaccggtttagatgagcagctttgctttttagtgagattgagttaatcttatatctttatgttctaaaaaaaaaaaaaaaaaaaaaaagaagaagaaagtaacaatgtccaaacttccctggagccatttctgtctctgtgaaataggcaatttaaggtccatcccatcctaaaagcttttagcttgtgaaaagcttcttttcttgcttttaaaaccttcactctgcgtttagaataaatggcattcctggatctgttaaataggcagttaataatgccacagaaactacccaccacacacccaaccacaaaacttgctcagaggcaggatgtgtattggaatattctgtaatgatccaatgctgaaacattacaatcagccttgaccctgcaatctgcatttttaattgcagccttcatttacagtggggtattggtctgctttcagtttgtcctgaaggttgactggatctcgtaatctattcatgtcagactgcctgctaggaccagcatgaattcagctcttcagaggaagcattgtcatacagagaggactcggccgtttgtttcaccttgatatatttcccaatatatgcttcattctctggggtagtttttattcctcttctatgaaatgtggattataaggactcatgccccatggaatttctatagggtttagatgagataatacatgtaaagtatttgatatgggcatgtaggaagcaccaaataaacagtagccattatgatttttcttgctctggatttaacttttttaagctcctgaattttggattagtaatgttgttgaccatggaggaaaattgaaaaaagatgttggcttcattttcttgatgactgaaaagtaaactagtggccgggcgcagtggctcactcctgtaatcccagcactttgggagactgaagctggtggatcacttaaggtcaagagatcgagaccagcctggccaacatagtgaaaacttttcgctactaaaaatacaaaaattagccaggcgtggggtgcacacctgtaatcccaactatatgggaggctgaggcaggagaatcacttgaacctgggaggcagaggttgcagtgagccgagattgtgtgactgcacttgggcctgggccacagagcaagactcctgtctcaaaaaaaaaaaaaaaaaagtgaactggtaatgagaaatgaattttggaaataatggtgaactgcaaacatggactataagttagaccatattatatcaatgttaaattctctgaatttgataattctactatgattatatacgagaatgtctttgtcttaagaaattcactcgagtatttggggtccaaggggcatgatatcttcaagctattctcaaatggttgaggaataaatatgtgcatagagacttatatagcagatgctgttaaatgttgacagtaatgggtatgggtgatggggacataggcatttgttgtaaagttaaacataaaaaagtttttaataaagtgggccagtgaggaaaaaggtagctggtaacttcattctgtgttttttcactaggtcagaactactggttcatttatcatttctgtccaaaggtggattttttccaattagtttatctatcctgttcttctttcccacccctcaattcttgattcctggggatggttatttgaaaagaacttccttgcccagctttcagtgaccctgctgttttgtttccaactcccagtcataatcctttgttcatgacattataatcatcaccacaagtggctaattgtgatgtcacaaatggaggattatgactcaaatgaggaataaacagcagtggcggattaattcctaagcaacgaagaagattctgttttgtgcaaatgccccagggtaataaaatttaaaaccagaaaaaggcaaggggaagacaaagctgaacatatgtgatctattagctaaattgtccttaagtggaaagcttttctttctctctttcttccttccttaattttccacgtggtatgaatagctcctctatggtagataaatcgatttggttttaggcctaacaaagctcaaggtgtcttgctgactaattacagggatgtcacacctgggctgaaaagtgagtcattatggaatctttgaggtgtttttattttccataaagttgaattgctcttttcagtcagcattgcaaaagtcaggctataaagatcagcacaatggccgaagacagctgggctgataattgacggcagtcccaacctggaaactctgggtaaggccagcagagccgaatggcgtcagtcactcaggacagttttctgaatgggtgatatgtaaatgaggcagtggtaacagctgttgctgtggattggcctagaaatagtagtcaattctctgtggagggtcaattttcgattctaagtcaaggatgtgtttttttcccttttaggaaataggtggttcccatactattcagttaaccaagcagccaaatccctctctacacttaacagctccctcatccttggggttacttggccgtctcaggaacactcttgagtttgtggccttttctaaaaccatggttgcagtagccaaactaaactggaaatccctttgaattgttttccttttcatgggacatagtgttcctttcttccgtttgatatatttcgttctctgtcgtgcttgagctctctctcgacttatgacttcaccgtcacttgaatattggaagccttcttgaaaaacattggtgaaagacttgaggctacagtttggcatcagcagcagagcaaataaaaccacactttaaaaacttggtaaatttagttatgaaggagacctcccattcgagtctaggcgtttaataatagcctgtatgcacaaagtagaaattatgtgattatcgtcttggggctgtgattagaatgtgttgctatatattggtaacatttagaaatgtgtaacttcatcccagctccatggtaccgtagggcaagcatgacataaacatggtcttgcagttgtacactggtttgagattccctggagactaaacagctatgagggagtcatgcttccgtttgccactgttgtctcctttgtctcgtataggctatcagagatgtttcctggacttttaagagtagctccaacagaagttttgccttctgagtagtaaggtggtcacaacttgtcctgtttcccctatgggagtgtatatgctggtggtgatggtgggggatctcacctttgtttccacatcagtatgctgctgccagctcccctccaggctgtgctgtcgggacacatctgtgtgcctgtatgtggctcattagggagcgggttgcctgttcttttgaggtgagcatacattttgatttttcttttggcatcttttggtttggaacatttacagccctttttaaaaatatagtcatttctgtgtgggttttctctgagccagtatttgccacactccagtgatattgagagaaacaaagggaacacgtccaagcccagaggggctctgtcttaacatctgacaggagcttctaagcccagtgtggttgttactgtgggaagtcgggaagtccattacccaaggctgtgggaaacacaggtcataaaagcgggggcctctgatcctggggcatttacagcttagtttgggagccaaaactggaccatgtgaaacagcttagaacaattgcagaaccaagaattagcaaatgtggattaatgtagattaaaacttgcctgtgagattccaaggtacttggaaatctgagttttacagttgactgggaaaggcttcctggagtagttgagtttgggaaccaggttttaaatgaaccaatatggggtggtgaagatgatcgtgatatctgtcaccagagacacctctgtgtgaatcccttccctgccattgactgaccttgggacaaattatttaacccaagtctagtctcctggagatgagcctttgtttctctctccccatctccctccctctctctgttactcctcctcccgctctccttctttcttttcccgctcctccgcctctctcattctctttcttaagtacaagactgcctacctccctcatctggtggttatgaggattaaacgagatagtacatttaaaaaattgggcaatgtgcttgcacttactatgttgagaatttggaattatcagtggaggcaggaagagttcaagacaaggaaactggcctgtgcaaacaggcgcactgatggagaaggaagacatcaaatgccttatcgtggagggcaagttagtttggttagaaaggaagtctgaccagggaggagaagagggttggttaaaattaagagtgtccttgatggtcccaatagggatctgactacctcagggatgcagatactgagttagcagtgcaaggaattcattgggggttagtgcctgtagcagaagtaaagggaagaagcaggattggacagggagaatctcagaatgtgctgcagatctgccatagtggacagaaacaggcagaccccagtagtacccctgactccttgcagcccttggctggggaagagctttgccttgacacaaaagctgcttggaacctgaaggttctttgcagctgagtagcaagttctttgctgaagggagctccaagttgtacccctgctagggctagctagagatacctccactatctgtgttggggtccctattctgtcttacttctgtcacatgtagtttatttcctacacagcattttatcatcaactataataaaaaggtaatgaaaatgtatcctgttagtctctgcccctagagtgtggcctttgtcagtgtaattgactgctggcacattgaggagcacaggagagggcatttcctggcaacctggcatataatggtgtcagatttcttattgccgtgttctcttttgagcttggaaagattagttaccgcttgttggggtatgagtgggagcgccgtgcttctgaacatttgcaaagcatctgccaggaccctgcaccgtgaggagcacttggtgctcgttacctcattcccgtggtcttgcgtggggagggacttgtttacatttgttttagtaccgagatgcatgcatgtccacttgatgggtaaggaaactgagtgttagagaacttaaatattaaggttctctaggaccacttacctcaggagtggcagagatgggacctcagctctttctgcccactaagcctgtcaacttaatggctctgctgtcatgtgacagatagagctggagctagggaatgaatgcaaagagaatttggcccatactagccctctgatacttaccattgttctctgtgccagggttcatgttagaactggcctgtgccgtgagtagttggtgagactgggggaaatgagtggtcttagacgtcactattggggactttaaatgagcacagcttctgtgaaggcgactgggccatgtccatcacagttagatttgcctatacccttggatcaggaaactctgcccccaggtgtgtgccccacagatgtacttggccacagtgcaaaatgactcatgtcaaggttattccttgcatcagtgtttggattttgaaaggattggaaataacctgacagcccattaataggggctgttttaataaattatactatgctaaataatggcatatgtgcagatgttacaatcagagaagcattgccctatgaacagatacatatgtttgtctgtatatcgaaatctctatttccctagatagccttgttaatcaggtgggggaaaagcagggcgtacaacggtatttagttaaagctactttttttatgggacacatacaggattatctttagcatcatggtattaatggttggtgttgtcttgagaggtatggggaagaggtgagataaggagtccatgtttttatactttgactttgatttatagaatatatacatacattatcagttcagaaaattaaatttaataaagacatccccaaaaccagccaaccaaaaatgcatcaaccgttgaccactgggactagcaaagagatcaggtagagcttaccagttagacaatacctaccctgaaatgaaaccaagtatctgttcacttccagctgacaggaaaagacgtaggaaatcttcaccagatttgaaggaaatgtttggaatggtttgacttaaacatcttattatctggcttatttggaattttctttagggggccttcagtgacacctcaagttggtccttagccatccaccctggtgggtgcccatagattcagataagcagtggagagcatgtgtgctgcactagccctgttcagggtaatagccagcatgtattcatacaacactggttaatgattcttcccggcagtcctactagggactccacctttgtcaaggccgtaaatggactttggggctgtacattaagagacctggcctgacttgatctggctaaacatggctttgggaccctcttgaagtttccagttgatattttttattcttttcaaaccaaatcactgcagtgaaaagaaaacaaaaaaaggagtttttaaatttatacaaaagtatgaaaaagaatgagaagttaggaaagtgtgaattatattttaagtaaggctttgtggctttgttgatcatggaaatctttttattaacacattagacaaattctttacatgccagtttgcattcacttaaacatttgtgggggtggtgtgtaaaatgtgcagcaatacctgctcctttttgggaaatccatttgttaaatagccctcagaatatgacagttttatagtaggattatgacttttttttgtttccatgtctgctaaaaaggctaacagaataggacaatttaatcacatgccattatgttcataggggtttgggaagctcagacatgtttctagaaaaggaatcgcgtacccagcttttccaagtttcttagcaaaattcgataattacttgatttggagatgtccccattcagccccttcttctgagggcatctggccttcctgagtgtggctgacatcactttcatgaccttggctctgttgaggtggttgtcagggaaggtgtgttgccagaactgtcctgtcactcttcgacagagagagacagagagacatttcctggactaatccatgtttccagccagatttatattatttacagggtattaggcaaggaccaggatttagccaggtgttgccctggagaattgtttcggacctcaagtcaaaaaaaggctgcatgctgactagcggaggaaacagctccccacgggccagcctagactctgtatcctggcatttgtcatcccagctggagttttttgaggcatcggagctagaataaagcaggagctcatcagaggctctcttttctcagtcgcctccatctttccagagactcagaggccaccagctgtggcagcaggtctcaagctttgtcggtgattagttgcacggcggggaaggctcttcgcattttcctctgttctggggctctctggtggattggagcaggcaaatcgggctcctcactgagcaggatgcaggcaagtcagagtgaaagaaaggagccagtatccccaccacccgctagtgttttccataccaaaggacttaacgcttatgtttgcaaaattcaatagtcagtacccttgtcagctgctgctttaaattctgtgtcctttgcctgtttctgggtcattgcctagtaaatggtaaacattgccatatcccagcttcctttttctgggttgccttgtgtgagccttgtcagtagaagaagcttagatagggcggcttgaccttggctgacttgccatattcttgaactgtcctgccctgcttctcaatgcatcagggaaaatatcctaacatgtctggcgtgccctttaacttgacagagagggcagaggctgaggaagtttggtggtacgactgcacttggttaagcagccagtgctggcgaaacaggccttacttagcccaggcattctgactgccatttgaggactgtttttactgtaataatccatcactctggactttatgctctaggaatgaaaattgtatttactattggcctaagaaaaacatattgcaattcatatttgaagctgcttagcaaagatccctaacaccagccagaagtgatttggctattggaattacctgttttggagagtgattcctataactgcttccctatcatcatctgtaatggttgaagctatgtgtatacattcacacgtttacacacaaaacaagataatttctttactgggtcttagcaaaaagtctagaagaattttcaataaaactggatgcatatttatgattgtctgacttaaaatgtagactgtgtggcatgtatgaatttcactttggagggaacagagtcttgagcaagcacctcaaataaatacataggccattactctctgctatggcagctgaaactaagaaacagtgagagggctatgtggctgcttatgtgggaagatttaatttctgttgtaggatgctgaggaccttggaaattgaggcactgaagctgaagtggcaagggcaagtgtgaattgcatcagatctttttctctcagggtaatttcttcatatcccaggtaaggtagcatttggatttctagtctttatatttattggtggtgagtaattctccccaaaaatggagggggagaaactagtatgcaaatgatgacaaaatagaagaaatctatctcattttgcagtgttcttatcccatcataaaaattagttgatcagataaattgaagttttaacctgattccatttatttcctactagacgcattttggaaatctcagtttgtgttctgaagattttctagctagaaagttttagtggggttagaaatagtgttcctctcaattgcttctgaatgaaagcatactccattggaaggaccatcagcaagggccatacattctaacaagtctcattgtttttcccatgctattcttcagcttcctttttctttggacactgtctcaaccatcccctgggtttggtgatgccagacttccttctggcattatccgcaaccgacaatggactttacttgttacgacaatatcaccagctttcattgcatgcggcagatggcctggaatgcagtttgtcactatcacttcttggaaatgcagaggcctcctggttcttcaaggccactaagcccaggaagggagcaagtgtgagatggcaaagaccccctaaggaacagcatcagatccctttctgggtgtttgttgcagggtggctcacttgctgcttttctccaggataaatggcaattgcttgatgcttgatagggacgtattaaatacaacggctgtctcaggaccctgtctgccttgtttttcatcacctggacgtctgatacatgcaaagtggaggaattactgcaaagagtggaagacaggttaaacaaacattcaccacaactaactgtttaagcttaagtcactaaaacactcattgtgtttttgctctgaaggtccatgaagggatagattcgtccatcctccttctccgtcatcacacatcaaggccaggattgtgccatttatggattccacatcctaagagaaaactgttcactcagatggtttctggtagtgactcctcttctctttgaaatgcccttcaaagtatttagccagaaacaaagctttttggtttttgggcttgtgtcaggcttttgctagagagtgatttttttttttcaaggaaattaatagatgatacagtcaatgctagacaattttagatctcagagctgtcttccttgaaaggtacattactgtttcttttacatctctgagatgagactgctcagagaatgattgattttggggtgaattgctatgtttttacatagacaaaataaaaccacagaatccttcaatagaggaaataaaatatggcacgccatcaatgtggaatattaggcaccctcaagtgtaagtctatgtatatatgacatggaaaaatgtttaagatgtggttgggtgactttaaaacaagttgcagtttgggcacagtgcctcatgcctttagtcccagcactttgagaggctgaagtgggaggattgcttgaacccaggagtttgagaccaccctgggcaacatagagagaccccatctctacaaaaataattagctgggtgtggtggcacatacctgtagtcccatctactctggaggctgatacaagaggatcgcttaagcccaggacataaaggctacagtgagttgtgatcacaccactgcactccagcctgggagacagagggagaccctgtctcaaacaaacaaaaaacaagttgcagaacaatgtgcaaaatggagtgtgatcctatttgtgcttcatatatatgaggatcaggaccatcctaaatatgtatgtatatctctgtgtgtgtctgtgtaattgcttagaaaaatgactaaaatggtatgaatcaaactgtgttccttcaggcaacactagggggaagtggacagagggtgaccattgcgttttgtgtacatctgtgtattgtcctgatctcatacaatgagaaatatttatacactatggataaacaaattttggaaaatatcccagcaacgttagtaatgcaacagtgctttccctggggccaccattttggttctcaccaagaacagatggtagcatcaagtatttcagtaaaattttaatatcataaaaagcatatggggctttcctaaggtctgagaggcacagtataatcatgttaaataaagaggacttacatttaaccttggattcattaacaatttattgctgggaggataaaaaggggatgtttacatcacacacgggtcgaagacaaatacattttcggttgcagagagtatataaggcaagtagaatgaagaatgagtatttcatgatacattttttacttttattaatttttgagtacattccagtgctaagcagtgaatagtatatgatacataatgaattttcttctgctcctacgcagagttttctccttaaggattcagctgcccttcaataggtgtggtgttagttaatggtttgatgaagagttttatgttgcacgtaagttgcaaatagcattccttttgtttggatgcccagtagaattggacaaaccagagttcaaatctccatggcacaacttagtagcaatacatccttgcattcaactttgagctggggtttttcagctataaaatgtaaataataaaattacttaactccatagagttgatgtattaaatgaaatagtgtacaaaattgatgtaagttacaggttgtggcacatgttgtttggtagatattagctgctattactacattttacagtttggaaattttcatgcgcgtccgtgtgaagagaccaccaaacaggctttgtgtgagcagcaaggctgtttatttcacctgggtacaggcgggctgagtccgaaaagagagtcagcgaggcgaggtaggggtggggccgttttataggatttgggtaggtaaaggaaaaacgggggttgttctctggcaggcaagagtgggggtcacaaggtgctcagtaggggagcttttgagccaggatgagccaggagaaggaatttcacaagataatgtcatcagttaaggcaggaacaggccattttcatttcttttgtggtggaatgtcatcagttaaggcaggaaccggccatctggatgtgtacgtgcaggtcacaggggatatgatggcttagcttgggctcataggcctgacagaaatgagcagaattgaaagattcatgacaaaagttggctacttctgtacatgcacctattaagctttttttggtatgttgtacattttcttcttcagggtcttcccagccctattagtaacagttgtttttatagcaattggataagatatgaaactaagaactttattattaattggttgctattccttggaataaaaatgaaaaaaagattaacaatggaagaatattaaaagtacaatttgcccattcattatatcagatgtctcagttttatggtgaggtaggcatcatattaaggtacaactatttagcgagatgtataaatgattaatatatgagaaattatgaatttaatacccgtccaaaacttgttagaataaatgacttttatgttcccattaggttttgtgatgggaaataatatattttatgtaagagaaaattcagatgcttctacttattacccatgaggtgtccgtgaacttggcacgatattccttttttctaatatattctgaactctcatggttaaatgcataggtaatgtgtcataattgaatacatgttcttatcaatagtgtctgtcagccagtttccagtagattcagcagacattttctgcctattagggggctggacttggtgctgaggagtacccagggagggttaagttcttgcccttgaaaggtgtgctcagatactccagtaagaggcaggcataatctgctgcagaataaaggtgcacaaggtgtgtgtgttcagggctggggagggagaagatgaagacgtattgaaatctgactccaggcttgtgtgtggagaggaattaagagaagcaaggctttaggccgggtgcagcggctcacgcctataattgcagcatgtttggaggctgaggtgggcagattgcctgagctcaggagttcgagaccatcctgggcaacacagtgaaaccccgtctctactaaaaatataaaaaaattagccaggcatggcagcgggcgcttgtagtcccagctactcgggaggctgaggcaggagaatcgcttgaacccaggaggcagaggttacagtgagccgagatcacgatactgcactccagcctgggtgacacagtgagactccatctccaaaaaaaaaaaaaaaaaagagagagagagagagagggaagcaaggctttaaaaagtaggtgatgttaatgagttgagtaggggatgaaccagctgggcttgaggatctaccatgccatttcagagacagggaacagcattttgaatacagggaagaatgcatgctaagacgtgggtgcaaaaatgccaattaattctttagggaatgactaactctctaacagagacagaactggaataaggtagacaggcaagaggccagttcatgaagggccttgggtcttttaaagacattaagaaaaagatttttaaaaagtcccttacatagttaaaaccacagtgaggtaacactatctcatgttgattggcgaagatcaaaatgtttgataaaataccaaactggtatgggtatgaataaaagtactctattacctacctactcctagactgcaactgtgtcagtacgaacatgcatctggttgagaacctgtcggtttccacagaaagtaaaaatacgcatactttctgactcagtgatcccacttctgagaaattatcccatggaaaaactgcatatctctaccaaggtttatgtactaagatagttattgcagcaacgattggaatagcatgaaacttaaaacatcctagatatccataattagggaatttcaaattgtgatatatttgtgcagtggggcacgatgtagccatttataagaaaggaagctctgcatgtattgatttagaatgattttccatctatatactgagtgaaaagaggctatgtgcagaatttgtacggtgttctgtttaagattgtgggagtgaggaacatgctattcattctcattctctctctctcactctcaccctcactctctctcattcactcacacatactgtctttggaaggatatggaagaactgttaccaaaagtagcttctggggaggagacctacttttcactgcgtactcttttgaactgtttggctttttttctttttctttttttttttgagacagagttttgctcttgtcatccaggctggagtgcaatggcgcgatagtggctcactgcaacctccgcctcccgggttcaagtgattctcctgcctcagcctcctgagtagctgggattacaggcgcctgctaccacgcccagttaatttttgtatttttaggagagacaggatttcaccatgttgccaaggctggtctcgaactcccgacctcgggtgatccacccaccttggccttccaaagtgctgggattacaagtgtgagccaccgcgcctggcgtgtttggctttttattgcaaggtcctccattttttcaaaatttggaaataggagttcctgcattggcttgaggctcctgatgtcttaagagcattgaaatgggtggaccaccattggttagggttatgggtagggtcctgaaaggcttaatgtagtagtttctaggtctcaattttctctctatgagaacaagttccgttgactaaaggatttctgttccctttctacctctgatatccagtcccttgcagggtccaacttcatacacctcggcattttaggaattaattcgggattttacagtttggcttgatttgattttattttgttttttgatttttgactattcacaagatttttaaaaatgtcatacatttccgttgaagatatgatgagttctacagctagtatgacatgttccaggttgcagtggtgtagttcaagttttatgtttgtttggttttaattttattgtttttgccaagtgaacaatagttcgaatcaaggatgctaattatatgatgtacagaattaatcaattttgagattaaaacactactgtatactatatactaaatatacattaatgttaataaatacatccctagttcaaaaatgttagaatgagtgaatgagtatgttggcaagagggatggagtgagatagggatttaaggatgtgttttgacaacattctgtggcacagtcaacatgaggttgagctgattgggatgtaactacatgttcttaaaatgaagactttgagggtgttgttatgagaacaaaccaaaaatgcggttcttccatgcacttgtagtaccccaaaattcccccaatgcttgtatgtttgtgctattttgttgttgttgcaaattgatacgagtacatatctattaaaaaattctagccaggccgggcgcggtgactcacgcctataatcctagcactgtgagtggctgaggtgcgtggttcgcctgaggccaggagttcgagaccggtctgaccaacatggggaaaccctgtctctactaaaaatacaaaaattagccaggtgtggtggcaggcgcctgtaatcccagctacttgggaggctgaggcaagagaattgcttgaacccaggaggcgaaggttgcattgagctgagatcacaccattgcactccatcctgggcgacaagagtgggattccgtctcaaaaacaaacaaacaaacaaattctagccacatgcttatttgcaatgtgagcccacatttggttttataatcctttctcactgatggactgatggactacatgaatacactttcttttgtattcatactggctgggtacttcagtgggtaggtgcatggaggagcaggtaaccggatctgagaattagtctttgccggggaagcgactagagccctagcttttttcaatggagaaatcccttttctggctttagccagtgtagggtagactgccacaaggagctatgataacttaccatacgtatttttcatgcttcaatctggtgatggttgatcttcgagtcagactggggtttaaatattgccttctccactgataacggtcttgtgacctgaaagtcttttaaactttctgagctttaaatttttcctctactcagtggggatgatgacagagtctctctcctggagttagttattgggaagattgattttgatggaattcaggacatactactccaaaatatggcaccttggaatttgagaaaacagcagaagcagaaaggtcacttttaccttccctgacccttctcccctgaggcaggttataaaacctaggagggccactctctggctttctcctgcttttcttcactgaagtaggtcctaagaccctcattccagaggcgcctccctctaccctgagaaaagaggcatccttatcactgaggtcagagagatgctgttggggctcagagaacaatactccgaagtctcatacttcggcatgctgagtacttttgaattaaagaaaattggaagggcttcacaactgccccagaagcaaggatttgggaactttctgttgtactcccttcgtcccccagggtctctctggaattccccatatctgacttagaaagcttcttacaaaataaatgcaatggtcttagaagtctcattaaataaccaggcacgattaaccatcagagaagagaaaagactaaaagtagtcaccatgcccagacatgtttttcatcttttcttctgaaggcagctttgagggattacctggaagactttatctgcataataagataacctttggtaacagtgcagttctgctccttaccttccagtattcagtcccattcagtttccaaagaatcacttataagctattgtctgtcctttgggctcattcattcccccctaaaaatcatttattgctccttcaaaattgcccacagccccccacttccctttcccctatgaaaagggtagttacgcctcaaccatttggcccttctttgagtctcatattttgcatgactcctgtacttatgcctgttattctgtctgttgtcagtttgagcacacataaacattcagagggagagggaaaattctttttatccctacaacaccaagaagaatttgaacaaacagtccttgctaatttcccctgcgtttattcccattagaccatattcttttatcctgtaattgtatttctccgtgactcttcattcttcatcaaacataggcataaaaatacataaggttacctatttcttagagtcttcatttccaaatgaagcttcccgtgtcacataaaacttacattaaataaatatctatgcttttctcttgttaatctgccttttgttataggggcctcaaccatgaacttaggttgggaaggaaagagatttctttttccctacaatttgatataaagtctccatggcacataagagatagtcagttaatgttgcttatcatcatcatcatttttttctggaaagggccacatagaacatgttttaggctttgcaggtcataccttgtctgtcaaaactattcaacactgcccttgtagcaggcaagcagacatagataatgcataagtgaatgggtgtggctttgttccaataaaactttatttacataaacaggcaggctggatttggcctgaagatagtatgtgaaccactgtagctgtgtgtgtcaatacagccttacttacaaaaccaggcaggatagatttggcccatgggacatagttggctaatccttacgtagcagtggttctgaaaccttttaatttcagatctcctttatactcttaagaattattgaataggacctgaaagaggttttgtttatgtggatcatatctgtggatatttactgttctaaaaattttaactgacaaattaaaaaaacttaattcattttaaataactaatacaaccatagcatgttaacataaataacacatttttataaaagaatatatgtggcacatatacaccatggaatactatgcagccataaaaaatgatgagttcatgtcctttgtagggacatggatgaaactggaaaccatcattctcagcaaactatcgcaaggacaaaaaaccaaacactgcatgctctcactcataggtgggaaattgaacaatgagaacacatggacacaggaaggggaacatcacacaccagggactgctgtggggtggggggagcggggagggatagcattaggagatacacctaatgttaaatcacgagttaatgggtgcagcacagcaacatggcacatgtatacatatgtaacaaacctgcatgttgtgcacatgtaccctaaaacttaaagtgtaataataacaaaattaaaaaaaattatttttcagatgagatcgggcgcgttcagggtggtatggccgtaggaaaaaaaaaattatttttcaaaacaaattttagttggaagagtggcattgctttatacttttgcaaatctttttaatgtctgcctcagcagaagacagctggattctcctaactgcttttgcattcaatctgttgtgatattataagtcatattgtctcctgaaaactcccttgcacctcctgaaagtatcttggggacccacaggggtctttggaccacagtttgagaatctatgtcctacagacatcattaagggaaattaagtattaccttgtaaatggcagctgcttttacctattattgagagtttctttgtcatctttttttctgagctaaaagtgaacatttcagtgtctgttccttccccctgctgtagaaggcatatttagtcatgtggtaggtgtttatgaaagcaggtttgctttattttctgaaatgattgtcaccttggcttgaattgtctgctgctgcatcacaatagagttttactactgtggagaaacaaaagccaggagatagtctgaattcattggagtaaaagggaacaaaagaagctagcttcagagcaggaaaatgcctgtgatgacaaagaagcctaaaagaatgatttgcataaaactgaaacacttgaaaagcttcaagataataaggttaaatacaaaaggagactcaacctcagagtggctgcttttgaaataagttttctagagggttttcaagaacaaatatttcctacttaagttttgagggcccttcaagtttaggtcagtgatatctgggattctgggttcttggcagtggtgagggggtctgtgtggtcctcttggaattgatccttatatagtaaatgggtggctctgaaaatctgaggaggtttcatgcccaaagtctccttattcttctctgtaccccctaaggattgccatatgctgctaaaacttggcttttcaaccaagaaataagtcaactctcacattgctagaacgatgctgtgggatcctcatatgaacctatatatgtgagatttttctcataaaggcaaaattatttcatccagatctgttttcttctttgatacctgcaagtaaatagattgggggataaagctgcaaataagctgagaatgttccacagtaagatttctcacagtcctgactagatagaaatgaatattaaagtaattcagcacagtactaaaagcttgtacctaattgccttttctttatatttagcttaactttaaaggaaatttataactaaattgggctcagtgaattccctggttgcctacttttattacccattataacatatttctgtttaatttacctcttccagccgtgatacttcagtgaagatatgagtatgtatttggaagatggtgaagtgaacttgactgttttgggaggctcaactccagggcttctcaaaaacaacagcaatgtcaaggaaacaattttagccttgttccagaatattcacattttgggttttctcttctgaatgtagaaggaaaaattcccctatttttttcacactcatgttcagctctgtcattttcattctgggtatacatccctttcccatttattacatctgttacttttatactacacaggaaatacatgtaaaacatcctacccactctgatagaaacaaatgtgcatccctgtcattaaagctacacctgtaagctttgcccctatccgggtcaaaaggccctatcatgtaaggaatcccagcaactagcaaggaagtgaagacagtctaggagggaaagactcctggttttctggaaacctatgcagtgggagctttaatagttgccctcaatctccctgccctccttgcttgcccctttgttctgtttaaggctagctgcatatttcttcttgtgttttcacggagtagtccaccatcacaccatatgggctttttcctgtggtgattaattaggttgcatgctgagctctctgattctttggggactgtgtttcctcatggtcttgtcagaacatgcagaatagctgtgtgatacttctcacatttgcacccactgctaacaaggtatctgacaactcctcaatatcatgttggatgcaaggcacaggatgctgctgggctagtgctgtttaattttcagatctctggtagctatgagtttgaggaggctcgggtcacattttcttatttatgtttcatctctactttcatatgattataatagtaatatttgaaaactttttgcataaaggcagaagaggaaaaaacccatatttagtgactaatttttctacagtataataatgaaaagaagtgagtgcagaaacatttctaacaattgttataataatgatggtgatagaaataattgaaggctgggcacagtggctcacacctgtgatcccagtagtttgggaggccaaggtgggtggatcccttgagcccaagagttcaggaccagcctggcaacatggcgaaacctcacctctactaaaaataaaaaaattatccaggtgtcgtgtcacgtgactgtcatctgagctactcaggaagctgaggtgggaggatcagttgagcccccaggaggtcgagactgaagggagtgccactgtactcagcctgggtgacagagccaagccctgtctaaaaaagagagagagagggaagagaaagaggaaggagagggaggaaggaggaaggaaggaaagaaaaaaggaaaaaagtagcctgtgtgctttcttttctttattttttgagacagggtctcactctgttgcccaggctggagtgcagtggcgcgatctcggctcactgcaacctcagccttctgggttcaagtgattctcctgcctcagcctctggggtagctaggagtataggcgagcaccaccacacctggataatgtttgtatttttaggagagacagggttttgccatgttggccaggctgttcttgaactgctggcctcaagtgatctacccacctcggcctcccaaagtgctgggattacaggcgtgagccaccgcgtctggccatgaatagtagcctgtgtgctttgatgcatcctgctaagactttacccatccttaccttttaaaatattgaccctaacatgctgagaataggaactgttactttcttcattttagagaagaggattttgaggcccaggaaataaagtaactgactgtaagtccctcttagggagagttacatttttacaaaacttttcattaaacaattaaaaaaatttagtttgagttaaaacgtttatacacacgtgtacacacacacacaggcacagtaaattgtacaaatctgaagtatgtggctcagtgtgtttctataggtgtgttactgctttcacctgagtggctgccttgcagatcaagatggaatactttctagcattccaggcacatctgtcatttttcccaaccccccaccaggtaaccactattgtatttccactcaccatacagatagatttgcccacataacttagggaactcttttgggtctgtctgcttttgctcaacataatgtctatgaaattcacacgtgatgttgtgcggtacttactctttagttattgattatacaactatacaacagtttgccagttttcttcttgttagaccttttgagttctttctagttttaggctttcatgagtaaagctgtaaagagcaatcttgtaaatgcctgttggtgcacatttgtatgcagttccctctggtgcctaccataagggataaggttaaatgtaattcatacggtgggtgcagaatttgcatttgaaccttgattctctataggcagagccttggctcgttaccactaccctctgctgctgcctgtaattttaaagcctgtatttctccccaggtaaggaagttgaatcttttttttttttttccccctgtatgaaagttcagtggactggcactttaagatggttcttagcagcttgtgtttgccccacttatataggtgccacaccattaaactgcctatcattttccgactgatgcctttctggaaaatagataaaggacatcagaagaatgcatcttatcagtattgatttagccgaaagggttgtaaagaaatcagttacagtaatgtcaaatttcataagattggttttgagagagtagctgtgtcaactaggctgacattttttctcttttggctttatttcgtagtatgggcattaatggtggagtgatccagatttggaaaccaaaaatggtatttctaaggcattccacagggctgggggagttgatgctgtatcttttcatgctcccttggtgctaactggctgtatggccttgggaaggccacttagtttctcctgcctcgctcatttgtaaagtggggggcataggattgtatcagtgaaacttcaccttttcttggtaatctgatggatgaccctctcctttgaaaaacaaacacaaatctgtgtaaatttcaaacccatttcatatgggcttgttgatacctgttagctcgtgatttcttaattataaaggaaattcccaattctattattaatgaaagttcagctctctgcattttggagaagtcttttattataccaggtttattgttctggacggcaatatatagcattgtagctaaaatgaaaatgatactccatggtctacctgcaacaaaagtgagctggatatactattgatcacactttaaataacttatctttgtggactgccactctgggcagccttgtgctgtgagggtagagaggtaaacaagtcatactccagctctacccccataggatttacagtagggataggatctgatttggtgaattactatggagaggagaggcacaaattggttgtctgcaaggccaggtagtatataaggagaggcacaaattggttgtctgggaggccaagttctggaggtagacggccaggtttttgtgggccagttactaaaaactgtacttcagtttgtccagctgtaaaaagggtatagtaactgtacctaccatttaggattgttggagctttaaatgagtccatgcagggtttcttggcttgggcactattggacactttgggccagataattgctgtgcattgtagggtgttaagcatttgtaaaatggggagcataggattacatcaaggattcttcaccttttcttggtaatctgttggatgaccctcttctttgaaaaacaaatacaaatttgtgtcagtttggcctctgttcactagatagctccagtgtggtaataaaaaatgtctccaggtattgccagatgtcccctggaggggcaaaatcaccccccacccaccccaccttgactttgagagccactagtcttatgttaaattctcttctaaatgctatggtaaaaacacctggtggctgttgccttaaagaaaaactcctctgagaaagccataattccctgcctagtgccccactgatggaaacaaaaatagaaagctaacaaagccctggtagcaaaggtctgtttgttcccattcccctgcttactgaattattgatatactttctgagatgaactgcatttgttcagataggattaatagccaccaccttcctgaagaacagtagcttctgcctggcccccgcccctggcccttgcaatttgacagtttctgctacctgctcatttgcagctcagcttccctggcttcctgcaagtaggtccttgctgagagcagacctgttaaatcatgttaaagccaggcagctcctgggagaaccccagcctgctagaggtgtgaacacaggtgctggacagtgagcttagctgcctgggataaaaaaacacatgcactgaagagctttgggtggctgagccccaggtatttgcttatcacctgttaatgaccacataccccataggcatccaccacgaaggggctcttggggcacctgagagttgaaattaagttagtgaagatgcctgcgctgggtgtgaggaacaagtggaaattacagttctgaaaaggcacttggaaagcagggagcagaataccagtatctgatgggttttgtttgttgggagagggagttggagggtgggagaatgggtagattctgattcttcttttattctccattatttgctcaaggctgctattttgtcaggggtttcaggctttggattttgtggaccagtttaaaactggaggcctgctgtaaagtagctaaataacttttaagtttgtccaatagagatgtttaaagaaaaaaaaaatactatttactgtcgccatcaccgcatcaaagaaaggatgctttgtcaccaaaggagtaggaggtgtataactgtgcaataaagaagagtcattgatgttaaatgaatcaggtgttatgggccttattcttggttattttaccaggacccgggaacgatgtcatcataggctggtccatttgtttcactgcacatagtagggattaaatgcttattactgcttagatgactgaattaatgaacagtggtaccccgtattcatcattcttggggaggactgatgcttgagcagaggccgtgaggtgccctcttcaatggcacccatcttcaattcttcctttttatcttttgcttttgacctttcctgaagtggctgaagattgtagcaatacacaagcatactccgatttcccctaagatgttgtgcctcccatctgcttcttgtttcatattgttctgttttcatgtgccctaagggacagttatgttgtataaagagcaagtcccccaagtgtcctccccacttcgggtctgcagaaaaatgattgattatgaggaatgtgatttcagtaatgcaggcaggattaaatgcttgccatctatcgacactttgcagtgccttaaagagagcttttaaaattttgggctatcactaaaaaaagaaaaacccagaaataccctgggggggaaaaaaaaaagaacctgggaaaatgtacagaatacaactgggagccgtcccattgagtaagtgcccaatgtgagctgcatctgcaacttaaagcaacactctgacctatttctcttactaataattggaacatatatagtgagataatatctgtaaaggaagctgtatttttttttttataacatgtataaagctaacagcccaaattccttgctttggagaattgcagaaatgacattaactcattttctttctttgatttttatctgaatgtgcaagtaattttttttttttttttttcgagatgaagtctcgctcttgtcccccaggctgaaatgcaatggcacaatcttggctcactgccacctccgcctccggggttcaagcgattctcttgcctcagcctcccgagtagctggaattacaggcgctaccacgcccagctaatttttgtatttttagtagagatggggtttcaccatgttggccaggctggtctcgaactcctgacctcaggtgatccacccgcctcagcctcccaaagtgttgggattacaggggtgagccactgtgcccggccagtattattattattattatttttaactagaaagcaatatatgaatacattgaagtttgaaaaaacttaaaaatacatgaaacatgcttaacctacccctcctagttccagtttcctctcagagataactgctgtgaattttatacatttactgtgcatttacatatggggaaatacctaattttcatgttccatgaatggtattttcatattattagcctattcttttttctacttaatatctcttagaagtctatacaggtcattccatagatagtgtctttattgttgttataataactgctgcatagttttccatagtataaatatttcatagtttatggagtatgtagctgttcatggttgtgttctattacaaataatgctgaagtgaaaaaagtagcatatgcatcctcatgcatatatgcgtttttacctatgattaaatgcacagaagtttagttagtatttgtattcatcagtgttctccagagaaatagaaccaacgggatctatatggagagaaagatttattataacaaattggctcatcggattatggggggtgacaagttccaagatctgcctgttggccagctggagacccaggagagccaatggtgtagatctagttcaaggccagcaggctgaagacccaggaagagctgattttttttctatttcagtccaaaggcaagaaacaaatgtggccctagctttaaggcagtcaggcaggaggaattacctcttgttagcagggaaggttagactttgtattctgttcaggccttcagctgattaggtgatcccacccacattagggagggcaatgtgctttttactcagtctatcaattcaaatgttaatctcatccaaaacaccctccagggcatacccagaataatgaattgaccaaatatctgggcaccttggcccagtcaagttgacacataaactttaccgtcatagtatttaaggatatttttattttttaatgcctattttattattatttttgagacagggtctccctttgttgcctaggctggagtgcagtggtgtgaacatggttcattgcagccttgacctccctgtttcaagcaattcttctccctcagcctcccgagtacctgggactacaggtgcacaccactgtgaccagataatttttgtattttttgtagagatagggtttcaccatgttgctcaggctggtcttgaaatcttgagctgaagggatccacccaccctggcctcccaaaatgctgggattacaggcgtgagccaccacacccagtagttttttttttattttttagggatatttgcctccccggaacgctgtgtcactttgtgctgctcctactaacaaagtatgaaaggactgtcctttctgcacatctcagccaactggtgatctaagctcattaaaaaaatattgagtcactatgtcagggcaactttgaatagttggtcttctgtactagtgaagagggcatgatgttttagagtcatgatggaagcagtgacctgcctccaggagtgtctcaggagcatgaggacactgggcacctttctcacagcccaactgggggatcattagctcaccaaaacttcttatatcttccctaatgaactgggctctctgcaaatcttttttttttttttttttttttttttttgagacagagtctcgctctcttgctctgtcaccctgactggagtgcagtggcgcaatctgggcaagctgtgccccctgggttcatgccattcttctgcctcagcctcctgagtagctgggactacaggcgcctgccaccacgcccagctaatttttttgtaattttttagtagagatggggtttcactgtgttagccaggatggtctcgatctcctgacctcatgatccgcccgcctcggcctcccaaggtgctggaattacaggcatgagccaccgcgcctggctttctgcaaatcttaaattgagcaatgcataaacttttatttctgaatggaagataccagtctggattcctgaaaaatattttggaaacttatatttcatgtgactgtgaaggtggtttagagcctttcaggggcgcacttgccctaaaccaaaatcaaacaggttaatttttaaaatgtcacaaggtttggccggtttggattctaagtctgttggaaggaagcaaacactggtagtaagattacagtaaaaacaatgcagctagctgcaggtatgttaatttcagcactatgcatgtctatgctggatcattttgtgctttaatcctttttgtgtttcatccttcccacagtcccactgagtcagaggtattgttgtctccattttgcagatgaggccactgaggtagagcttgcctactggggatacagctgataagagtgtaagccagctaatgcgtgtgacatgtcagcctgacccaaaactcttggccatatatggcttattggctttgaatggttttcatatttttaaacagttgcattttattttttattttatttatttattttttttgaaatggggtctcgctctgtcacccaggctggagtgcagtggcgcaatctcagtttactgcaacgtccacctcctagattcaagtggttctcctgcctcacccttccgaatagctgggattacaggcatgcaccaccacagctggctaatttttgtatttttagtagagagggcgttttgccatgttggccaggctggtctcaaacttatgacctcaggtgatctgccctccttggcctctgaaagtgttaggattacaggtgtgagccaccgttccccgccttaaatggttgcattttaaatggttccataaatacctacctaatcttgactttacttcttgcctaagatacttactatctagccgtgtatggaaaaattttgcaatgcctcctcttgactattactccttcatttcccaagactgaaaagaagccttttcactgtgcaaattaaccactgtgccagtggttctcaaatttcactgtgcaagagaaccactgtgccagtggttctcaaattttagtagggccctgaatcacctggacggcttgatgcaacatagattgctgggccttattcccaaggtctgggttggagcctgagaattggcgtttctaggtgctgctgatgctgctgttcctgggaccacactagaagtaacattgagctagaagggtgaaccagtacttccgggtgtttgccaagttactgtgagagtgtctcactccagttattggtagtagtagcatcccctttgagtttgagccataggtttgttgcctgacaaaatcatgcactaagcacggaaaacttttgttttgatgatgaagaaatttaaagtatgatggaagtggctgtctgaaaatggaaacagctagtatgaaagaacttcagctttttctgcttacatgttttaatcttaaatgtggttagatctatatttaaatctcttccttatttaaatgatgataattagcatcaattattgatatttcactatgtgccaggctttgtgctagacccctttccatgtcgaatcccatgtagtgcgtacaatagttctatgaggttagataatagtagccccattttaaaagtaagtaaacgaaggcttagatataagaggaaacttctcttagtctcttgactagtaagtggccccagatcattccaagcttgtccaacccgtggcccagggcagcatgtaccccaggatggctttgaatgaggcccaacacaaattcgtaaactttcttaaaacattatgagtttttttgcatttttttttttaaagctcattagctattgttagtgttagtgtattttatgtgtggcccaagacacagtccttctttttccagtgtggccgagggaagctaaaagattggatacctctgatttagacccttgttcatatagttttctctttactttctttttattattattattatacttcaagttctgggatacatgtgcagaaagtgcaggtttattacataggtatgcatgtgccatggtggtttgctgcacccatcaacccatcatctacattaggtatttatcctaatgctatccctcccctagccccccgcccccagagaggccctggtgtgtgatgttcccctccctgtgtccatgtcttctcactgttcaactcccacttatgactcagaacatgcagtgtttggttttctgttcctttgttagtttgctgagaatgatggtttccagctttatccatgtccctgcaacggacataaactcatccttttttatggctgcatagtattccatggtgtatgtgtgccactttttctttatccagtctgtcattgatagacatttgggttggttccaagtctttgctatggtgaatagtgccgcaatagacatatgtgtgcatgtgtctttatagtagaatgatttatcatcttttgggtatatacccagtaatgggattgctgggtcagatggtatttctggttctagatccttgagttatcacaacactgtcttctacaatggttgaactaattcacactcccaccaacagtgtaaagtgttcctatttctccatatcctctccagcatctgttgtttcctgactttttaatgatcgccattctaactggtttgaaatggtatctcattgtggttttgatttgcatttctctaatgaccagtgatgatgagctttctttcatgttttttggctgcataaatgtcttcttttgagaagtgtctgttcatatccttcgcccactttttaaagagcttctgcacagcaaaagaaactatcagaatgaacaggcaacatacagaatgggagaaaatttttgcaatgtgtacatctgacaaagggctgatatccagaatctacaaggaacttaaacaaatttacaagttttctctttacttgcgtatcattcagctttcaccttcccccatggctaccacatgaatttacatttgtctgtctctaaaacattagaaaagttttactctggaaaaagatatggcccatcagatacaaagttagtgatgttattatagtctttttttttttttttttgagacggagtttcactcttgttgcccaggctggagtgcaatggtgtgatctcggctcactgcaacatctgcctcctgggttcaaacgattctcctgcctcagcctcccaagtagctgggattataggcacctgctaccatgcccagttaatttttgtatttttagtagagacggggtttcgccatgttggccaggctggtgtcgaactcctgaccttaggtgacccgcctgccttggcctcccaaagtgctaggattacaggtgtgagccaccgcgcccggcctgttattatagtctttaaaaaattgtcctttaactgccatcgattatttttacaaatttgaattatgtaaaatttttatatagaaaaaatatatgagacatttaacagatgctaatatcttgtcacagcggcttaagactttttttttttaaagagagaacactggagaattggcaagttcctaaacatccatatccctttcttccccattgatattgtttggctctgtatctccacccaaatctcatctggaatataattcccatgtgtcgaaggagggacctggtgggaggtgattggatcacgggggaggtttccctcatgctgttctcgtgatagtgagggagttctcatgagatctgatggtttaacagtggcagcttcccctgtgctctctcttctcctgctgccttgtgaagaagatgcctgcttccccttcaccttccaccatgattgtaagtttcctgaggcctccccagccgtgcggtactgagtcaattaaacctcctctctttataaattacccagtctcaggtgatatctttatagcacggtgagaatggactaatacatctatctcaaaggaatatcttcttttgcttatgcatacttttatctagagcaaaactacaaaaacatgcatgaaaggtcatatatagcagcttctgcatatgacattgtaatcaatggtatgttgacattttttgagtcagtacacagtgggaggtgacaagattaagagaatgagctctcttgatgttcatggaggggtaggttgtaggcatggtattagtaacataccaacttcaggaatttttatctggcatcccaagtaccccctttcatcagccatgttttgttgttgtttgttttattcattttttcctagtttctcctaaatgcatgtctttgggttcagagttatagggtcttatcagggttttgacagattatctgaaacatcaaatatgtttttttttttttttgagacggagtgtcactctgttaccaggctggagtgcagtggcacgatctcggctcactgcaacctccagctccctggttcaagtgattttcctgcctcagcttcctgagtagctgggattacaggcacgtgagaccacgctcagctaatttttttttttttttttgtatttttagtagagacggggtttcaccatgttggccaggattgtctcaaactcctgacctcgtgatccacccgcctcggcttcccaaagtgctgggattacaggcatgagccactgcacccgggctgaaacatcaaataattttaagcctctgtatgtgttgtaacctcctttgttaggcaaggggattatagtagagaatgaggcagataaaatacccttccccttccccatggaccttaaattcaggttattccaatttttattagccctcccccaaatttaatataatatgatttttctaaaggtaatgcttgttaaatacagtcccagattttacgtgctggccgcagcattcagcagttaacatcatcctgtgtgtggcaggcagcgtgtcccaatttttggtttgtagaaggtggtcaccttatctattatgtggcaatgaggcatccacactcttattagatggcctgcacaagttatgtgcccatttccatttgttaatagacattgtgctaattgcatgggtgatttaaatgttaaaaaggcattaaagcatttgttgtaataattaacaaagagattgctaggttacaaatgaacgataatgccgtattttaaaaatacagcattacatatctgtgcaaagtgatatatgttatgaaacattaatatccaaatgagagatttgaactgaatgatctccaaaatcctttctaatatgtcttttctggctttctaaaatatgagctctatgactattaatatattttgtgagatgtcaactgtgccatatttctgcaaacctcaaggagaggccacagcctatctttagtcttatgcaagtatattaactgaaccttgcatggtggactagaggttgctgattgtcttctattatttctccataatagaagccctgtttttctaggtgggcccatagctgcgaggaataaagaccagccttcaccctcccttgtagttagccatggtttaagtgtgcaacttctaggacatttcctcagtggaagacggtcatgtccttagtctgttcttcctccctgatagctggaatgtgaatacaatggctggatcttaagcagccatgatgggaccacgagattggtactatgtgccgaagatgggagagccacaagatagaagcagtctggcagctgtagatactcagatgtacagagtatttcttgcagaaaagtctgctactgagggaaggagttaggggctgagattcaatccaggctctttctcaagttgtgttcttagagaaaggtggggccttttactttccacaaaaggatcatatgtttgctaaaccatatacttgcagggctccttccaccaggagggctgcctttctgtcatttgttcagaggcgccacgtgagccttgatactgtgaaatgtcccaccatcccagacttccctacctctgaactgtattaatggtagagagaagttacaagttacaagaagtatcttgttttagctactcctgttttgatattttccattactggtacctgagtctaatcctgataaatatatcactgtctttttctttgcaagagtcactttggattttttgttcacaaacagcaatcaaatttgagtaactcagttgaagtgttttggaagtttacagaagctcccagaatagagaggcaaagtgaagaaacattgctggtcatgggcaaggaattccagaggctgggaagtgagtgctagaggacagcatacttaaagccgggatggtctggtcataggtacagcttctgctacagagagaatcatctcctgcttgctttttttttctttgttttttttttttcttccttaaggagcttatttttttgtttgtttgtttttgagtcagggttgtcctgtctttttccaggctggagtgtagtggcatgatcatggctcactgtagcctccacctcccagacttaagccatcctcccacttcagcctccctagtagctgggactacaggtgtgtgccaccacatctggctgatttttgtattttttctgtagagaccaggtttcgccatgttgcccaggctggtcttgaactcctgggctcaagatgtccacctgccttggtctcccaaagtgctgagattactggtgtgagccaccgcgtctggccctcaggaaggtgtctgtccatttggcaaggcccagatcgtatgtcttgccccctcactctactgggttgggtggaggaaggccctgggttcttggccaccagttcctggagcaggagtgagtgcagctgggttgactgcctaactgcctgcagtggagggggcacagatttccaaaaaagaaatgaagctgctgggaggatgagggatgaattctgagcaaccaaaatagagaaaacaggaaagaagtaaaagacaacgatgatgacacatgatcacacgcctctgtggtctccagattagaaatggaatagggtacatactagtttaccaccaatggcttttttttttttggtccttaaatctctaccatccaagaagtgagtgctaactctgtatttattagtccctggatagataagcagagtcagtactcactgctttgtgtagagtactctcctagacataagaggagcataatgacatactggatggagagggtctcctgtggtgagggtgctgggaacactgaaatgcatccagaatcacagggaagcttcagaaatggctctaagctctcagctcactgccaccgccacgcccctttcctttataactctttagggaatggtttgtttgcttttttccccagaattggggatcacgtcacaactctgaggttcctctaacgtcatcttgaactctgcagaagtgtgtttcttcctctgaagtgctattttgtggtaatttaatgtatttttttcatgaataatttacccatagagtcctaatatcttaagacagtgaattttgttgtttatcaaagatgtatctcaactaggagacagaaatcaatttcttattacaaagcaaagacaaaacacaagatcatctaccctgtgggataacaatctgttttggaagcattttggattattaatatttaagtcaggaacacatggataaagaaattattgtccctttttataaagaaagtggtatatttattactcatcttatgtgtccccattgcgtactctttttttctctcattatcttttcttattgttgggttatgaagtgtcctgaagtcacagcattttagggctaaaatacaaactgtacttaaactacctggtaaaaatacttgcttactttttaaataaaaactcccagctgggcatgttggctcacgcctgtaatcctagcactttggaaggccgaggtgggtgggtcacgaggtcaggagttcaagaccagcctggccaagatggtgaaaccccatctctactaaaaactacaaaaattagctgggtgcggtggcaggcacgcgtaatcccagctactcaggaggctgaggcaggagaatcacttgaacctgggcggcagaggttgcagtgagccaaaatcgtgccactgcactccagcctgggcaacacagtgagactccatgtcaacaaaaaataaaaaataaaaattcccagggacataggcttcataaccaattatggtgacttgtttctttgtcttaaactctagtagtatttattgcaaaagatatattgatgctcttgtttaattgttatatagctgtttcatggattcacgtgttgtaaaagatttttatgtttttgaagtcaaatagtccatacaggccatttttttctgccttgtgtggttagtctctgaatgcccacaggaaagaaaaatagtagcaataatagtaatggttacaatttattcatgcttcctatatgcaatgcatcatcctgaccctaaccctttgaggtacatattgttattattcccattttacagatgaggaaactaaggactgagtttttatagccaaaggcaatagacccagaacttgagaggtctctgcctcaaaatcactcttgtattttcccacaatgagtaaattgatacacatacactttttttacttgaaggagaactagtaggtgttactataaagaatgatttgtgggccaggagtggtggctcatgcctgtaatcccagcactttgggaggccgaggcaagcggatcatgaggtcaagagatcgagaccatcctggtcaacattgtgaagccccgtctctactaaaaatacaaaaaaaattagctgggcgtggtggtttgtgcctatagtcccagctacttgggaggctgaggcaggagaatcatttgaacctgggagttgcagattgcagtgagctgagtttgagccactgcactccagcctggcgacagagccagaccctgtctttaaaaataaaaataaaaataaataccaaaagatttgtgttttattgtaggtattagaacatattaagctactgtttcacccagacatatagctttgtaaaaactaagactcgactgggtatggtggctcacacctataatcccagcactttggaggccaaggtgggtggatcacttgaggtcaggagattgagaccagcctggccaacatggtgaaaccctgtctctactaaaaataaaaaaattagccgggcatggtggtgcgggcacctgtagtcccagctacttgggaggctgaggcaggagagttgcttgactgggtggtggaggttgcagggagccaagatcatgccactgcactgtagcatgggtgactgagcaagaccctgtctaaaacaaaacaaaacaaaacaaaaaaacaaaaaccaaaaaaaaaaaaaaaacgcagactcagagaaccaagacagatttggaaacttcattcagggaagaatttgttagatcattgacattgctttagttttaaaaattcattttatattcttagctaattttcattttaacaagctgtgatggtccatagaaatgaatggaaaaatgccaggttgattgaaactgtatgctggagaaggtgtggatccactttaacacatacttggcttcagcgggttaaaagactacacaatcatgtgacattgtgacattgtgatgtgaccatccgttagttttaaaatctgagactgttttatattagttatgggagtgagcagaaagcacagaaggaggtttttgcctgtgtctctgttgctttgaaacaaaatcaggaaaaaccgtatctccaaaagcagcctgtgtgccatcttctgtgctactgtaacttagtaacttttttaaagcaattagaaaccagggacttgaagtggcccagagactcataagacaggctgatgatttcgctggatagaattggactttgcagaaaggttttgataacctttttggcctggtgccctgccctcatctagtcctttcccatttgtaatagaagcatgaagttcaatgctattgacttcccaggagtcattgaattgccacacacacagtgaatttggagtttggttcttaagttgaaaggggataaacaatcgacattgaatttgtacctcttatagctttgttgacttaatggattgtccccaacaatccatcaagaatggtacatataccagccatcacctggctcactaaaagccagtagaaattcccaaacctcattttaggcaaggatttccacttctcctcttgtaaaagctttcccaaacagcaaggattccagacatgagacattgtattgctttgcctgctgtgaaactgtacgatcttacaatggagagagaagaatggcaattggatatgaattgtagaaatttgggagaaggaatttgttcgttgacttgtattttctatgaagatgtaatcgaggaaaggccctgggcttaatttttttaattaacagagaagactgcaggtgttctcaagtatttatcaagcccctgcgccttgggcctctaactgggagttgtggggatgactggtgtcgaggtcttttcttgctaaagtgtgtggggagtgcatactcaggggatgtgcccctcctctctgtcctttgtagtgactcttggctctcccgggtctccccactgccagttttcctctgtgatacagccttcggtggtgtctttgtcagcaggcttggcagtggcagagaaagggaacagggagaaggtggaataaacctaactggtggctggccctttcctattatggttccttaccctcccttttccgttttctcaatccttcatcctgtttcttcctcccagaagttatgttaatcaattctgaagtctctctgaattgaggccatgtgtggttggggtttggaaaagcagggcttacagttaggttgagtctgatcatcactcactcactctgctctagcgaccctggacttcttgctgttcctcacacttcccagacacccttgtgcctcactgttttgtaattgctctcccctttcctggaacgttcttttctgagacccaacttgctcttgactgcttctgtgagtctttgctcaaatgtcacattttcctaaggcctttgctggccgctcttgctcactttacagtgcagtcctgacttgtcctatgtcctctccctactttttttctcctgggcaccatttgtcattctatatgttttactttatcttgttcattatttatccctcctccgtcctgcttagggggtaaacaccatgatgacaagggaattttttttttttttgagacacattcttgttctgtcccccaggctggagctggagtgcagtggcaggatcttggctcaccactgcctccacctcctgggttcaagcaattctcctgcctcagcctcccgagtagctgggattacaggcatgcaccaccacgtccagctaatttttgtatttttaggagaggtggggtttcaccatgttgaccagtctgcttttgaattcctgacttcaagtgatccacctgcctcggcctcccaaagtgtggggattacaggtgtgagccaccactcccggccaacgggaatttttaaactcgtatttaattgtaacatgcatgtggaaaaatgcatgcattatagtgaaccgctcaatgaataatcacaatatctgaacacagccatgtaaccaactcccagatgaaaaaacagtatcactcccgaaggtctccccatgctcccctcttcccacttcaagggctactaccgtcctgacttctgatatcatagatgaggtttggatggcaagaacttctgtcagtttatttcactgctgtatgtgcaggatatggcaggtgcaaagtacacattgattgagtacattaaaataatactggaagagagacctgtatttctgatgtagctagatttctaaagctgacctccattgatggattaatccccgccaatggaaaatgcagttagaggctttagaaatattatccagtggcaaaacactggccattataacttagacgattagatttgtcacttgtttctgctgcgttggccttgattatgtaagtattttagctgtgatgtctttaagtccactcttcttgcttgtaattttaatttattgtctgttctatttgctggcacttaatcagacatctctctggtgattgtcttacaggattatttaacttcttcttgcctttcaactgcattgtaaatttaaccaagcataataaatttgcaccaaattttacccttcagtgttgattcttccctagctggaattactgtacatttctgtttctggtcactggccactctctggtactacttgagaattgattactgttccaggtgggtgactacattagaattgcaacctgaactattttagcgctttaagtaatatagtatcatcagttttgattgtgctgttaaccatttgatatttgatgatgagttcaaggatacagtggcttcctagaagtttgggttacaggtgcctccagtagagatgtttacaaactcaaagatgtaccattcactacagagacactatgcaattgagtacagttattgggcctttatcctggaagatggtagagatgtgtctagagaagggagtaccttttctaacttgcacaaagtcacatcagccaactgatggggtttgaccatctgtaagatggaatattatacaataatttaacaagaagaacattatatttttggattagctttgtgtcctgtttttcatatttaacaccatgtcctgcatattttcctaagtcaaaaagttcctggagaacttttttttcccttaaaatccatagaggtcatcccctggctagggctgccatgtaagcaaaatccatgtgtcacctgggatgctctcggttcaagtaagggaagacccaactcagaacaatgagaaaataaagaaataagttagtataaatactggagatccagaagtagtgtatttccagacaatcagcgaccagtgaacttcactggaacctcatattgtttctgactttctgctctgtcatctgtggatcagatttagctttagagtggttctccttagtatggcaagatgcagcaacatgaagtgttgcatcgagaccaggagaaaaaggagtagaccaattcgggcccttgagcttgtcttaatctgtgttgtgctgctgtaacagattaccacagactgagtaatttataaggcacagaaatttattgtcttatggttttggaggctgggaagtcaaagatggaggggctggcgtctggtgagggctttcttgctctgtccttccatagcgaaaggtggaagagcaaagagagagggcaaaacaaatacacacacacacacacacacacatgcacaaaagagggccaaactagtctgtttataatgaactctctcccttcataatccattcatgaggctgatgcccccgtgggccaaatacgttcattaggctctacctctcaacaccactgcattagggatcaagtttctaaaagctgaactttgggggatacattcaaattatagcaaagtttgcagttgagctgaagggaaatttggacactaaattgattttgatgtagcagaggaagcagtctggataagggtggggatcagatacaggatggggcatccagcccacttgctagaattagaattgggcttttggaactctgtttatgcataagtcttcctgcaaggcttatatttaaagcaactatataaaatatgaaagtcagtatcaaatttctagtcctgttttcctttaatttcagtactataacttcaaagtgaaattgtaatttttgttaggaaatgagtaacggtgaattttatgttatgtctgtttattttggttaaatttttaaactgccttttaaaattttccttcagacggggtgtactatctggcacacaggatgcctaatacatagttattcaatcatggaaatgtattttctgttcttaagaactttataaaggtgccaactgatgttggagttctgaaagtaatgttttaatttgaatgatttgagagatacaagtggaacttaaaaaattatttgtcgagtgggtttctcggggtgagcagaggtcgatgataaatttagaggagttggttttgtgacccaaccctaggttagaactatgcagtattcagtctaagtcaaatatttaggactattctgatttcctgtctcctttattttcaagaaatgtctttgttgtagaattcatataatccatcctttaattggtacattgttcaaaggcctggtaatgtgtggtaataaacttttgttttatttcccagtattttattggatgattgacaggaagttacagatttaaagtcatggtgacttttctatttttttttctttttactgtcacaacagcattaattttcatggcctgatgatctgttgagatatctttctaagaagttgctaagttttatctgccctcatcttcctccatccctcccccttggtattaccattataaataggatacatgtgcacatttttggtgaaacaagaaaagggaaacccccatggtttcattgtctttaaatatatattttctcatgttacgaggtccttgtttctatcaaaaagggttggatagaaagtaaaaatgatggctactgttagattatctttagaagagatatatattattaaaaataccattaacttttaattttgaaataattgtagattcacaggaaggtgccaagatagtacagagcggtcccatataccccctttttttgttttctctagtggttccatcttacaggattacagtacaatatcaaaaccaggagtttgatattggcacaatatatgtttgtaggtcgtggacattttatctcatatatggtgtaaccactgctgaagtccagatactggatgattcccatgtcacaaagatttccctcattctacccctttataattgcaaacatcctttcctctactatctccaaatggtggcatccactaatctgtcttacatctctctcatttcgtcattttgagaatattgggctgggccctgtggctcatgcctataatcccagcactttgggaggctgaggcgggtggatcacttgaggtcaagagtttgagaccagtctgaccaatatggtgaaaccttgtctctactaaaaatacgaaaattagcctgggtgtggcagttggcgtctgtaaccccagctacttgggaggctgaggcactggagggggaggttgcagtgagctgagatcatgccactgtactccagcctgggtgacagagtgagactcccatctccaaaaaaaaaaaaaagtagttatatacatagaatcatataatatgtatatagtgtgtgactttcatagtgcccctgatctccatccaagtcattgtgtgcaccaatagtttgcttggccttattgtaaagtagtattctgtggcatggatgcaccacagttggtttaatctttcaccttttgagggagattttggttgttttcacttcctagctgctacaaagtcaaatattaacagtgcgtacacgtttttggatgatcataagttttcacttccctgggatagtcaccccagaatacagttgctggggtgtatggtaaatgtatatttaagttttttttactgccaggctcttccagagtacctttcccactctacactcccaccagcaatgcataagagatccagtttttttgcatccaccccagcagcttttggtattaccactatttttttattttagcgattctgataggtatgcagttatatctcagtgtggtcccaattttcattttcctggtggctaatgataccgaatatcctttcatgtgctcatttgctgtcctgtctttgtgtcttttgcccactttcttattggatttctttttactgttgagttttgagagttctacacacactctagatagtagatatttgcaaaccccatcagatatgtggtttgcaaatattttttatcagtatagagcctgttcccacgtcctctcaccaaggctctttatagcacaaacattcttactttgaatgaaatcgaattgattgatttcttctctctggccgatgctttggttgtcatatctgaaaactcttcaccaagcaccaggtacagaagattttctcttctccttttttaccacttacgagtttcatactttacatttaaatgtacaatccattttgagttaatttttgtgtaagttgtgagatttacgttgagatacgcttttttttgggacagaatcttgctctgtcacccaggctggagtacagtggcgtgatctgggctcactgcaacctccacctcctgagttcaagtgatttctggctaatttttgtatttttagtagagacaggattttcaccatgttggccaggctgatctggagctcctgacctcaagcgatctacctacctcagcctcccaaagtgtgagatacactttgtattttattttttaaattttttgcctgtggatgtccaattgctccagcaccatttgttgaaaagactatccttcctccattgaactgcctttgcacctttgtcaaaaatcagttggccgtactctgtgggtctccttctgggttctctattctgttccattgatctttatgcctgaatctcagcctataccacatagtcttgataactttagatatagaacaagtcttgaatttggatagagtgattctacccactctattcttctctttttgaagatttgattccctgcctacctccaccactacccccaccttttttttttttttttggcttggaatggctactgtgttcattgcaaatgaccacagcactccctgagaaatcttccctttcatgtggcacatttaatcctgagggccagttctaacggtttggtaatgtcttatcatctgttttattcctttctggattccaattttaagtcagatcgagagaacaaggcctggcccagcaggagagttctctgatccttcggtcctatctgacttgggtatgataggtatgtggtatcaacaaagctgggtttttgcctcactggtatcaaataaggcactgctgagtgttagttggagaagagccagaagcttatgactggctgggatgagtggtagagaacaggccttccccacatatttaatctaacctctctagtttaaatatttccagtggatcatcatactctatgaccttgtgacataaatctgcacagagcggcagttcttatcttcagacttcagtcaagtttcattactgtggtttatgtgtagtggctttgttttggggcttccgcttatactgctgtctgcttgtttaccatctctttcaagcgaaagggtcttttgatttatgacttggtgggatccttttcagcattgatagagagatgtatgggttaatggttgaaaatacataggatttggttgttagagtatatctagagaaattgagctactttgagggaaatataatatcaaatctcacttgtactgataatttgtataatggaaatatactgccattaaatggataacacaaaaaaattgctaaatataattgtaagtaggcactttcctacctaggacatataagataaccacaaagccattttataatccattaaacactgctgatagaattatatcttctccaatgcatgccccctaaattgcctgtttcgatgcctgaagttttgccattaaggattattattattgtatttttgcatccctagaaattttctttgttggattgacagttcccttgagtttatgatttgttaagctgttccaacttattaagattgaattggccgggtgcggtggctcacgcctgtaatcccagcactttgggaggccgaggcgggcggatcacgaggtcaggagatccagaccatcctggctaacgcagtgaaatcccgtctctactgaaaatacaaaaaattagccagccatggtggcgggcgtctgtaggcccagctactcgggagactgagacaggagaatggcgtgaacccgggaggcggagcttgcagtgagccgagattgtgccactgcagtccagcctgggcaacacagtgagactccgtctcaaaaaaaaaaaaaaaagattgagctattgaatttaattttgattttgattttctgtggcatttttctgagtgctgtagttttgaatgcaggaggggagaggaatagacctggagcccaagttgtttgggaaagtggtttaagtcattgtagtgtaaaatcataatttttttttttttttgagatggagtagtgcggtggagtgatctcatctcactgcaacctcagcctcccaagtagctgggattatagatgcttgccaccacacccagctaatttttttgtatttttggtagaaacagggttttggacggttggccaggctggtcttaaactcctaacctcaggtggtatgcccagctcagcctgggatttgggattatgggcatgacccacggtgcccggcccatatcaaaaagttaaaaccatggattttatacaaacaaaatgaatacatgtcaaacgcaaatcattaataaggcaaacaataatcaagtaaagttggtttaaaggacattttgaggaactgggtattcgtaagttacaaaggcatgccagaatatgattgctaggttacagccaacactggttaatgtcctacagggtaatacaactgctgcctgtttttctttctttaaactggatataaatctacaggttaatgtgtaaggtcaccaagtcttaactttaatcccagtaatatcaagtcaaacaatggtatgttctaggtaactaaataatttaaggtgagcttgttaaattcttcacctaccatgacactgaaatttcggagaatttttcttctcagcagtttgcgaagcttcttggctactgataatgcctgggttttatctactttacagttttgctttggtctggtatggaaggctggtctacctgtttgtgaggcaaagcactttaccagctggtagctgaaccatttgtgatattttcattgtttttcttcttctctgttgacatttgccactttcagtcccatttccatctccatgtctttctttcatcttgttagagtgcatttatgcctctcaaatttgcctagcgtgctggcaaagaggaacagtctgttggagatgagtgaattacagagtcccatatgatttactttcttcactgtcttggacttggagttaggtggacatgcctctgcacacacccgtgcgaccttgagcaagtctggtgcttactttaaaaggatactgtgaggagtaaagtgttaaaataaaggatttaaagctatgcatggtggtgcacatttgtgatcccaacactttggaaggctgaggtaggagaatcacttgaggctaggagctcaagaccagcctggtcaacatagcaagaccccttcgctacaaaaaaattaaaaaattagttgggtgtggtcgtgtgtgcctgtagtcccagctactcgggaggttgaggcaagaggatcatttcagcctaggagttagaggctgcagtgatctctgattgcaccactgccctccagcctggaagacagagcaagaccttgtctcaaaaaaaacaagttaaaaaagaaaaagatttaaaaatggtgtctagcacacacacagtaagttttcaattaagatgatctagctaagagctatgtattttttttgtatcttattattttatatcttaggtgctctaacatatttgaaaacccatatgcttaaaaggaccagggagcaggcctggtggctcatgcctttaattccaacactttgggaagctgagatggaaggcttgcttgagcccacgagttcgagcccagtctgcgcatcacagtgagacctaatctgtaccaaaaaaaaaaaaaaaaaagaaagaaagaaagaaaaaaattagctggacatggtggcatgttcctgtagtcctggttacttgagagtttgagatgggaggatcgcttgagtttgggaggttgaggctgcagtgggccgagattgcaccgttgtgctccagtctgggcggcagagagagaccctgtctcaaaaaaacaaacaaacaaacaaacaaaaaggaccagggaggctccctgtaagtagctaaaggggcttacagaattaaatacaggagcaagggtaatctgatatctggcatcccagctgaggggagaatagtgattagtaggggcagtggtgaaggggagaacatttgcactaagtgaagatggcccacaactgtgcatccgggccagttgttgccgtatgtttcaggatggcttgataccaacatttttaaagggaagagtaaagtctgattgtcctgtgttctttcccctttgtaaaggttggcaactgattgacatttaaaaaccgctatatttttgggtttcatagagtaggctatcagtttgccgtgtttgctctgggttgatttaggttactcaacaataaaggtaaatagttaatttagaccttgtaagaccttgtgaccatagcaatcattttcccagtcctctgctttcacagacaagggagtagctttgggcaaagttacatggcccgttagtgacagtacttttactttttatgaaaatgagctttacttttacacattctttgatttggggagttatatggtttaacatactcattttttaacaattcaccatgcatttaaaacatgagcctagtgattgttagaacaaaggagggaaatacactgaaatttgaacagtggttatggttatttttattttcttgtttatgctttttatgtactctcttgcctatttaatgtactctgctcattaatgtactttgcctaatgtgcttctatagtgaatatttattgctttcattatcagaaaaagcaataaatgccattaaaaaaagaattcatcatggaaatgcctagatatgtgataatataatgattgattagtttcatggctcccaagattgttgcccataacgtggtggttcatttcgtttgctccatgaaaatgatagtgcgtcttattttgcacctgagatatgtttagatgggtcttccttaggtctgctgcgatttctttgactgaaggggtttgtgaccaccacggggcatgtaagttgctggtgccactcctgggcagcttgcctgtaagggataccgtctgtgttggcagaaccaggggcttgtcctgctgggctggagcccaccaactgttgcagctacagtgcctcagctgtcgtgcttttacactgtcattagccatgcagacctttatggctcaaaccaggccacatctgttgtgagtcctgtgaccttcaaaacccacaccaggaagaaatgcaaaacacatttttatctccaggctttctgcaaacacatcattttagagggcttatttaagaatgtttttctaaacttataaaagactttcatttttcttgtcttccattaacagcggaggttcattgttaatgatttgagcaaattagtgttgctcagaaagtagtttgttaaccacttgcatctgatcacaggagtttgttaaaaatattgtctcaagcctcacagtagtccagtggaatcatgatctgaggggtgtgtttgtccatccacattttaaaccagtgatttgggcatttagggctatatgccctaagggacactctcttttagagaggtaggcatgaagttagaaaggtgactctaagatgagtggtcatgtggtgaattgggcacctccaggagtgcctagacttcttagaaagtttgcttttgttcacttatcacattattgagaaagggagagtaaactttagggaaaggggttccaaagtcatgttacttgcagagtgtttgtggccattgaaagattgggaactggatttctaggttacaacattgattcatttggctatgcttttcagaaatagtaatgactataatgaaattgtcctattttctgtatttgctgtgggcccctttaactcagttccctctgaaaacctgttgaacactgttctactctttctgcattattcaatgccaagccaaggtgttaggcttcctgatggatttatgagcctcacatttccattgctaaagcagtgaatagaccaaggaacgatttggctccataaaaatagtttttacccccgttgagttagcagtctcttgaatagaaaaaaggaaaagagaaaaagtagagttcccttaaattgtggggatgggataggtagagaattgaaagacagagggtttgactagttttgttcttggggacaggaacattagtagggagtatgccatgaaggagacacagaagctcactttcctttttccttttttttttttttttttgagacggagtcttgctgtgttgctaggctggagtgcagtgtcacaatctctgctcactgcaacctccgcctcccgggttcaagccattcccctgcctcagcctcccgagtagctgggactacaggcacgcaccaccacgcccagctaattttttgtattttagtagagacagggtttcaccatgttggccagaatggtctaaatctcctgacctcgtgatctgcccacctcggcctcccaaagtgctgggattacaggcgtgagccactgtgcccagtcagaagctccctttcacagtgctatgcagggctttaaagccacacatgccagacattctagatggaaatttctttttcccatttatttttccagctttttctgtagttctccactgtccagtaggaatggaacgtgaactgcataggtacttttttttttcttttttcttttttttgaagcagtctggccctgtcacccaggctagagtgcagtggtgagatctcggttcactgcaaccttcacctcccaggttcaagggattctcctgctttagccacctgaataactggtattacaggcgcccactaccatgtccagctaatttttgtattttcaatagagacgggggagttcaccatgttggccaggctggtcttgaactcttgacctcaggtgatccacctgccttggcatcccaaagttctgggattacagtggtgagccactgtgcctgacccacatagggacttttaaattttgtagcagctaccataaaaagtaaaaagaaacaggtggaattaattagaataatttatataacccagtatatctaaaatgtcattttgacatgtaatcagaattttaaaaatgttgatgagatattttgcctttttgtttcttactaagcatttgaaatcctgtattagcaggccgggcgcagtggctcatgcctgtaatcccagcactatgggaggccgaggtgggcggatcacgaggtcaggagattgagaccatcctggctaacacggtgaaaccctgtctctactaaaaatacaaaaaattagctgggcatggtggcgagcacctgtagtcccagctactcgggaggctgaggcaggggaatggcatgaacccgggaggcggagcttgcactaacacggtgaaaccccgtctctactaaaaatacaaaaaattagccgcgcatgatggcgagcacctgtagtcccagctactcgggaggctgaggcaggagaatggcatgaacccgagaggcggagcttgcagtgagccaagatcactccactgcactccagcgtgggtgacagagcgagactccgtctcaaaataaataaataaataaataaataaataaataaataaataaataaataaatcttgcattagctaggggcgacagtgtcggacagcacaatttggaagggtgcttcttatccccactgctcagttaaaatgtgaacatatgcctgcgtggaacattccctttttctgtttaaaagaaagtgaattgttttcgcagcagttagttggtgttagcataatgccttcctgtgtaggctgtagtgttagaattctctttacaagccttgtaataattttcaggaatgatcacttttattatagtatttttagtgccactagagggtttttacagtgtgaaatctcttaaaaggacagtcaaaaacatactgtgtttcttgtgggacacagggttgggcatttaagtacctagtagtgttcttgagacagattctatgaaattagaattgtccaggagaaacccaggtcaaaggtcactttgtatcagttcaaacatgttctatattggtatttcatgtttgggtctttatactctgtatattttgtgaaataactaaatcttcatgattcatttctatgttgtagcccctcacacttaattagggggtcccagtggagcttcctttccgtttctctatctgtttagagtgtctgggtgtgtattcatttctctgtcatgtgccatgtgactttggcaaggtccttaaccattctgtgcctagattgcctggtttttaaaatgggaataatgagagcatttatcccagaaagctctggtgagggttaacatgagatatttcagttgaatagatcagcacagtgcctcctggtacatggtaagtgctaaagaagcattacctatcaccagcaccattactcattttctttgtgaattttagcaactaaagcagagcaggacaaattttaggaatggatttatttctttgacattgagatggagctttaaaaagcattcctgacttcttcccaaaacataaattaaaaatctttgtttctgccacaatatctttagtctcatttccctgttccttctactgtttcatcctgggattgatcaactcttcacttttgttttgttttattttattttgagacaaagtcttgctctgtacccaggctggaatgcagtggtgtaatctcagctcactgcaacctttgcctgccaggctcaagcggtcctcacacctcagcctcccaagtagctgggattacaggtgcatatcaccatacctggctaatttttgtattttttgtagagatgggtctatcatgtttcccaagctgagctcaagtgatccgcctgcctcggctttccaaagtactgcgattacaggcatgagccaccacgcccagccaacatctgttcactttgggtaaattattttaataagaactctctggttagagcatgactgttaaagagaaacttcctaaatgcattttacaaagtgctttttctctttctcgctttttctgaaacactggttcttgaataaacctcagatatcatgtatgatttctgaaatacctaaaatctgcaggcttttttctctcctactttttggttccattatgttaaatatcaaagaatagattaaccagaatatgaatggacaggcatgcaagaaaaactggaggtttccagttgctcctaataccatctatttctctcaccttttcacttaatactcacttactgattatgcagaggtgatatttaagaacaaatccatttaataaacctttgtaagtaatatttaaaggagtgtttatttttcagaattcacccaggatttctgtgatctgcggttctttggctttggcacccggttgtcccaatttgttccagagtattttactgcatatgcgatgtctttctcgtttgctgtctataaatcaaaggaagagttcgtttcatttaattttgcctgatagggaaacccccaaagatacaaaatgactcttcaacgttagtgtatttattaaaaataaaaaaggaaactgcctttttgttctccttcctatcccaagtttgattgaccgtattgcagagtcataaaaggatttatattcagagttgaaaagtctccctgaaattgatttcacctagcttcttgtatataaatagatattgagagggggggaataatactgaactgaaactttcaattttgaatgtgagctttccaaagtcatgaaactgcttttccgtctgactcttcagatggatcttatagcataattggtcagagccagaggaggtttttgaaaaagcatagccaaaaaagagaaaggaaacaaaccccacttttttaatagctgcagtttcttcatcaggaaaggactttggttaaatagctcttcttcccaaaaaggcaaaacatttttcctcatataattaatttaagaaattgcttttagagctatttaaacagacctagagataagtgctttagccatcttgatgtgctctagcgaaaatttttatgtggttagaatttttttaattaaatcacttcatttaagattgtaatagcccttttaaattattttccttgagactcgtattgtgttatttcaagttaataactcctcttcaagcaaagcaaaatgcaagatatttcttctgatgatttctttctgcaattgaagagaacaaagccagcctcattcttgctggaaaggaagcaaatctaacacctaataaaaatggagataacaaaaatgaacctgtagccctgggatattctgactagcaacattaaagtggttgcctgggcaatactaaccccaattccttgagttttttttttttttttctttgaaatgccggggacaggcctacattgattgaatcaaacaaagccgatgagaggcctgtgtttgagggggaagaaatgttcctacagacttggagtgaggaagagagcagtgtatttggaatttttctacccaaagcatatttgtccctgaatacagatgcatgattatagagccatcctgaacaggtgctaaagacaaagtctttctcattgtgcagagacaatttaccatagatttaatttattaattagcctttacttagatgtgctcacaccgacttacggaaaagttctttttagaattgttttgggaggcagagttgaggttgaggccatgctcacatccatgttaaaacaatgatttttttttttttttggagacagcatctcgctctgttgcccaggctggagcgcagtggcgtgatctcagctcactgcaacctccgcctcctgggttcaagtgattctcctgcctcagattcccgagtagctgggactacaggcgcaggccaccatgcctggctaattttttgtattttagtagagatggggtttcaccatgttacccaggctggtctcaaactcctgagctcaggcaatccgcctgcctcagcctcccaaagtgctaggattacaggtgtgagccaccgcacccggccattttttttttttttaattttttaatcatcactgacataaggttcctctgaaatccatagtagagccttctgtacctctacaagtatcatacaggcaggaagtttttttttcttgtatgattatcaagggtgtaattttatgtactatatagctaagggaaaatttagtaataatgtatattctttcttttccttattttctctgtgaatacttgtatttggcttgattctcattaactattatcttttttttcccccattgatctgtctaagcagttcattttgtgaacaatcctaattcagatgaagaagggtgaaggtgaagtttgtaaaaataatatcaaaagaaatctaaaaacacgttcattaggcatttgaccaagtaaatataaatagatgagttgaatatttgttttgctttccaaactttttcttccaggagcactccctccacagtcccctgtgcacaggtggaagtacacacttaacaatgattcgtcttgactcaccctggggatcggagtgaggagccactgtttctgctcttgcccgcctccctccaatctgttccctgcccagcagagttgtttttacaaagcatatattggttaaaatgttctaaaattagattacagcaatggtttatgcaagtctgtaattatactaaaaaccattatatctcaataacgctgctttaaaggaaggcatatatcagaccatattgactgccatgttggttcttcattgccttcttaagttcctttaaggtcctgaaggatcctgacttggtgcatcttcagcctcccacttctccccaacaccagctcatcaagatttaccagggtggatgccaccctttttcctgcctcaacatccttgtatgtgctgttcccctgtctttgaaccctatcatctctccctgtcaatgccctcaactaaaatgatgtttcttttctccaaatgatgtttctttccctgcctcctctctctctctaagtacattctttccctgcttgtattctctgtggctgtatcatgtgtgtttcactttattttcatgttgttcagtcattatacaagttttgctttatgtgtttattgattgccttcctcatggactggaagctccaagagggcaggaacggtgtagagtatatactgttgaatgccatggcagcatcctgtcatggagagaccaagaaaacttgcctaaatcttaccaaacttcctagaaattatctttttgataagcaggagttaggagctacttaagcagatggtgggtgttggaggtggagtacatagtttgctgaccagaagcacaaagcttggggaatagatggcgatgggctattgagtggctgaccagctagggttcaagtggtttcttcaacctggctctggaagtcagaggtctttggttttactcgggggagagttttggaatgaggtccacccccttcatgatacggtgttttaagcaaaggggtgtcatggttggagtgtcccctgtatttgatccccagacgcaggtcctagggcttgtgcattcagggtgttttctaccatctaccatgtttagggattatcttggtggatatttttgttattgtgaagcttactcatttctaagttctggaattattaatcacctgcttgctcctggcacattttgctagaggttgtggatatgctgaggtttttttgttttttttttttaagacggagtctttctctgtcgcccaggctggagtgcagtggcgcgatcttggctcactgcaagctccgcctccggggttcacgccattctcctgcctcagcctcccgagtagttgggactacaggcgcccgctaccgcacccggctaattttttttgtatttttagcagagatggggtttcaccgtggtctcgatctcctgacctcgtgatccacccgcctcggcctcccaaagtgctgggattacaggcatgagccaccgcgcccggcctatgctgaggttttaaaatgggtacccaaccacatttaaatagggcttctttgtccatttttatatatatatatatatatacatatatatatatatatatatatatatatatatacatatatatatatatatatatatatgtatatatatatataaacctatttcattcaatatttcacatggaatgtgcatgtaaaaatgactcaacaatataaaaggcctatataaaaggcctatttctttcaaataccaaagttaggtgacatagtttgttttggggtttggcacaaagttactaaccatggtgctctattcgacttatacaactgacaaataactgctggatgaatctgcttttttttttttgagatggagtctcgctctgttgcccaggctggagtgcagtggtgcgatcttggctcactgcaagcttatttctcatggataaaaatgtgttaggcagtcacaattacacattttaaatgaaagataacatgaatcaagataatttattaatcaacatgtcactttcttatttgcttccttaactcaagttgtaacttaatgcttacttctttatttttattttatttttgagacaaggtcttgccctgttgcccaggctggagtgcagtggtgccatcacggctcatggcaacctcagactcctgggcacaagtgatcctcccgtctcagcctcctgaatagctggaaccaccttgcctggctaattttcatttttatttttgtagagatggggtcttgctctgttgctttttttttttttttttttgtttttttttttttggtagagatggggtcttgctttgttgcctagactggtcacaaactcctgggctcaagctctcctccctggttggccttccaaagtgatgggacttggcctatttgaaaaaaaaaaattttttttaaggctagtcaagggaagcagtgggagtggagaaagaacaaagaaatctgttcctggttgtgatcaatttgatacatatttctgcttggcttggaagtgactttcttatttatagacaataaccaaagtttgtgtagttgtaattggaagttagaaaaatcactctacattttactgttaataatattgggaacatgattttatcttagacaattgccaatagtggtggaaagactaacctagacaacttctttcttttggaattgttacatttttagttttatgaggctcatgtagaaatttttcacttgtgatgtttgtttacctttgagcaagtggagtagctattcatattaactcacagatatttttatgatgcctaaaattcaattttgtgaagtatagttgtagtgtagtatcagttatagaggactgagagtaatatctggttcagacctatgtgttcttatgtaagtaacataccttttctgaataattgtacctaagctacaggactactggaagaattacatgagcctgtgtattgatggtaattttaatgatgctttcctcataggcaataattgacttgatttagtaaataacttatgattgggccaggccatgggtgcaaacacagatggccacagggactctttaagaaatacaaatgaacaagtgggactgggtggagaaggcagctagctggatattcatgactcttctctaaagagctacttgctattcacatagcatattgttgccatttgggaacatgacccagctctcacattttaaaaaaatgaaaatacagatattggtgttctctcctggggttttccacactggcaactaatgcaatacgcatacacccatgcatacatgtacagtgggtgaaacaaaagttcagatgggtggccgtgttcagcatggtggccaccagcatgtaatctctctgctgtttgccatttctgctggccattaaagatataaagagatgccacaattgtaaaatggaaagtacaggtctgtggcctttgatattacaccaacactgtctgtcactgatcttcattttcctggtaatattatagaatcaggagatttgtttccttgagaatcaaacagtagtaaaatggcctgaaagagtagtcattttatttctgtctgatatttgatgccgtgagcccaaatttttttaggaaggtgcctgtgagaaagagggaaccatggtatttttcagattttcatcacaaatgtataatgagctccattataaatcagttttataagtgtatcttttctgagatctgttggaaagtgtgtattttttaatttctgaagttttaaaactgacagagttaatggcagaggaatgactccaatgttttgtccattttagcccttatttatttttttttaatagattctgccctttgtaactgacactatttaagagtaaaataatagaggacttcagtattttgttctctgcctggcttatagctcatttttacaatgcttttttttctgtttgtttttccctctaggatacgacattgctgtgtgattcctctttcccttgaattgcctctgagtttcagtactttattttacttaaaaaacatcatggctctatattaggtctctttattcatgtaaggtgatgaaaaaaactttttatagttgaaacagtaagtatatttgaatatgataaaatagggaatctagtgtaatataatctattgtatttgaggttagctcagtattacaaacaactagaaggaccatttataatgcagtgcttacaaaggaacacactttttcattttactttttgggacactcaccgagcacattttactacaattgattgaaatacaggcacaaaggaaatgagaggttgatcagaatatttaattacttttaacttaatttgatacttttgcccattgtaggcataaaaaaagattttcattttagactattgtgtgggatttaatgttcttaaatgctctttaaaatttagagaaaattgtgctcaatggagatttcaccatccttgagggatctttaatttgtttgttgatgtgccattaaaatagatataaacaacctacttaactgcttgtctgccattctggatatcttcgttctagatttgacaatgtgagtgcctgttgcttgtttttagttggcttatgttttggcagtatatctgggagaagaactaggactctgtatatgagaaccacccacccatcaccctaagtagttttcattttggcactggagaaccagaatttctttgttctgatgttttcaattttatatggaagctgacctattctcccaggcttctaagtcctttggaatgacctagaattggacatacagttaatgagaaatacccttatgtgttactacgctgttttgctttgatcataggatgtgcagccatattgtagatggaactttgggatgttctcatcacagacttactctgctttcacctttgcataacctttgtcatataatcacttttccctgtaggagataatgacatagcagaggtcaagtcgacatggctggttcaatacagtcagatgaaccagtgttgtggatgaatgccggggttattttggaatcctttgtggccatgtatcttcttttcttggtggacacctcagacttccattgacattcatatacacaaatctatatgtaaatggaccacctttgtcaaaaacagtaagacattcattgtactctaatttcaatcatgaatttgcaatcttgtaggaaaaatattccctatggatatattatgtaacaacatttattcatattcaatatagactcagtgaccctttcatctctctgagagtaaaacttaagaaaaaacatctatgtcacgaatgctgtttcatgtggtattcagaggagccgggctctttgtatgaaaaatgtttagactgcaaattaacacagaagagttaacacagcttgcaagtctttttttccccggaagtcaatatttctgtgaaacactgagagtaaggattacacagaatcctcccgaagacacagttaaggcagatgggatacacatctgcttttttattctggaataaaaacatttattcttataaactatgtccggtggctctgggaaattaaatgaggcacgtaggaaacagttgcgttgatatcttcagtagtaggtgactcttaggacatttttataggaagaaattgggcctttgggtctggaattttttttttttttttttttgaactggtaatagaatttattcaaatgtgccttaatataggcgctggggcttgcccatggtgctctcgatatataaggcccggacattctgccagtttttcttgagcaatgacaccaagaagttgacagccaggtgaatgttatacacaagctcatcggctgtcatcttcacgtgaccaacagctacagccagacataacaccttcttcatttggaacttgattgtggacttcacctcacccactttggccaccatgttttcgttgtgtgtgagcagggaagggaactttcctgccttatttagacctgggccgaggattcgtggaatctgcttgatcagagactctgaggccaaaaacgcatcatacttcttggccagcttcttgaccagttttttattctttttgagttttttcagcgcctcgatgtccatgtgggggatatccacggccttagcctcgtcacagtgctgctggtcccccaggacacacacacacaacttagggcggggagtggacttaagtctgacggtgcccgagaagcacttgtccttctgggggtcatagttcttcaagctgatctgcaactccaccgtctccaggaacttgcggcgcttgcgctggttccggtgcaggacttcccgcaccgcctcgtacagggtgttgcgagagactgctgctcatggcttctcacgccgcgctaaccggaaaagagcgggtctggtaatatttttatctttttttgcttcgggctggaaatgaggtaggctcagtagaagttctgagaagagacagagtttatggaaactccctgatgaaaatacctgtcactcattcagctctctgcctagcaaccaacttgacttaagattcctcctgctgagtgagacgtaagcatcattggctagttaatactattggttttgaaatctccactcttaccttgtcaaaatcgagagactcagattttcctgtatgatgggagtcactgtattcttcctttctaaacccatttcattattacactattcagactacttaaatgtgatattcctgatgctcaggtttgtcaggccatgggtgtctgtgtgtgtgtgtgtgttggttaaaatgtcattagagatgacctctttgaggaggagaatgcagcaatgtacagcatatactgctgggcttctctgtgtcttacataactgatattccaatttctcgctgtgctataacatgactaaaagtcctcctaagcttttcactgaaaaacgacttcccctccataaaccatagtgggcttggtgctgtaacacttggtagaatatatgtgtgcataacaccatgtcctccctcttgttattcacatgataaccataggcagatttacacttattgtctattctgaagagtgaaactacatattttcataagcatgctccatttttaattgtgtaattaagttgctgacataagcaagtatgcaatttcacattaaggtgaggatccgtaaaggcattcatttgcataatttaattttctgcacagaagatattgaaaatcaatagcatgattcatagccataccatatcattgccacaccgcctttggttgtctgtctgagcttagaagagtacaaagagtattaaaattgattgaattttggtgtgctgactctgtatctttacttgggaaccacagactgtttctatttgcaaatcactgctccttgccaataaaatattaagttgcttaatatactctatatatactttttgactgctgttcaaataatagttttaaaagttggtttttaaaaaaaatcacagcatcgtcgattaaaatgcatttgaggagaggacttaaagtgttgtcttattttaaattatgtgagtgccagtaataatgataattagtcctcagacgcttttgttgtgcgaacatcatagagtgtacttaacaaacttagatggaatagccagcccactgcacacctagaccatatggtgtagcctaatgctgctaggctacaaacctgtacaatgtgttaccgtcctggatactgtaggtaattgtagcacagtggtaagtatctgtgtatctaaacatatccgaacacataaaaggtacagtaaaaaatactttattataatctcatgggaccagcatcatatatgcagtttttcattgactgaaattttatcatgtggcacattacttgattatgctcttacagataggggagggggagaggtcacacattactgacagagatggaacaaaagggaaaactaaatatagtcacctttaatgagtagtttatctagttaaaaaataaaatgtggtgctgaggttaaaagtcctgccctgttcatttctgaacaattgccttcctaaagaattgcttattggttactcagggccattttctttttgcttcatgtattaaatgcttgctgtttgtgataggtgggcagtggctagagagtcagtgaggttctgggtggtggttttgcctgtggcttatgtaaacaggtacataacatgcatagatacacacacattttcttaccatcactaccctctagaacacagaaaccatcagctttttgatctttcatgtgttcattcattccctcacttttttttttttttttttgagacggagtcttgctctgttgccaggctggagtgcagtggcgtgatctcggctctctgcaagctccgcctcctgggttcaagcgattctcctgcctcagcctcccgagtagctgggactgcaggcgtgccaccatgcccagctcatttttgtatttttagtagagacgaggtttcaccatgttggccaggatggtctcgatctcttgacctcatgatccgcccaccttggcctcccaaagtgctgggattacaggcgtgagcctcgcacctggctgccattccctcactgttgatgaacacacaccatgcgctgatttccattgtgagtggtaggttgacagtagtagttcaggaatatgcctgtgccctatttccagggagcttagagcccttcatacgccatgcagcatgtactttagaagccagttttcctgcccatgctgaccttgctgtggaaaacccactttgtacctcaatactttgcgtagtgtgaggaagataagattaacctaccttcttgggatggccctgtcccttctgttacctcttgtcgtatgtagcagaaccgtaccttttacttctgtcttaagtgaattacctttagacaggcagtcctgttgctcaagtccaattccttataccacattgtgatgtatatgtgtgtctggggtgaagtccaaggcatagggttggttggttggttttaaagtagcccagggttaagagagctctagtacaacaatggccttttatggatggagaaatttatgaccaggatttcaagtgatggtttaaagcatacgatgggtgtcatttgaggatcttctttggtacaaaagacagaaaaatgtgctttagcaggtaaaactgatcccagtaaaaatagaccctcagagagggctagcttcaaatcagctttgtcgaaggtttaaatattttattttagttattttattaaactttctttctttttcttttcttttttttttttttttgagacagggtctcactctgttgcccaggctggagtggagtggcacaatcacggctcacttgagcctccctggctcacgctatcgtcccacctcagccagccaagtagctgggactacaggcgtgtgccaccacacactctaattttttttttttttttttttttttttttgagacagaatctcgctgtgtctcccaggctggagtgccgtggcgccatctcggctcactgcaagccccgcctcccaggttcacgccattctcctgcctcagctggggctacaggtgccgccacttcacccgtctaattttgtttttgtatttttagtagagacaggatttcaccgtgttagccaggatggcacacgcgctaatttttttattttttgtagagatagggtttcgccttgttacccaggctggcagagtttaaattttgtcaacagaattgattttttggtccccctggctttggttctaattttaaggtcctctgttaatcccttacttggtcctcaaccaccccccgaggcttccactttgtctaataccttcaggaaggaagaagaatctctctgactggccagtgtgcccatacctgaatgcatcactggggccacgagaatggttaaaagtgattgactggcttgaaccaaacaaggctcactcctagagctaacattggtggtggcgggttagctgtccaatgcgtgatacacagctagctggagtggggatatggttattacaaaacagatcctctacagcaaatttccactatgttgtcggacactaaaaagcactagggctgggtgcagtggctcacacctgccatcccaacactttgggaggaccaggtgagaagattgcatgagcccaggagtttaagatcagctacaaaaataaaaaatcagctgagcatagtggcatgcgctgatggtcccagctactcaagaggctaagttgggaggactgcttgaacccaggggttaaggttgcagtgaaccatgatcttgctactgcactccagcctgttcgacagagcaagaccctgtttcaaaaaaaaaacaaaaccaaaagcagtgtatgcccagtgctgagttaggtgctctgctcaccataacttgcgttatctttgtaacagtcttagaaggctggcatttttaggtccattttacagtcaaggaaattgaggctcaaccacataccctaatggaagccacatttattactaacatagcaagacagtgttttactcactgttttgatggaaagaggaaggattaatggggaataattatttgtagaatggtttggatggaaggcacctaaacctaccttgtacttgaaaaatgagtggaagcttaaattttgacatgaattttctttgaggaccaatgagcagacataaatgacatcaggtttactttttaggcttgtgttgagaatttataggattcttgtttccctctaaagggctcatctctgtggaatactattgttcaagcattacatcttttaatgctagtctttttaattgaagtgtaagcataaagtactctacaggtttcttaattttttttaatgactgtcacattgtctaaaaggctaataatatcttggcgatattattccattgactaatttggaatacagaatgcgttgtgttttcctggtcccatctttgtcttcaattgaatatacagcttcccaaaactttcttaaatttttttttttctctttgaaagcaggcttgcttttgtttaggtgcatttaaatgttatcatagtcagctggggtatattgtttgcgtgtaattccgtttcattttggattttgaggcacctgtgacatttgtcttcttatacatcagtgttttcaggtgtgggctcacaacaaaagaaatccgcatccatgaggtagctgggaagagagggctttgaacgctatagcaggcagatggaagctctccataatgggtgagagtagtatttttgctgttgcttggtggattgaaatgattttgagatttcaaatatacatcactaatcagtgtttcttttgtgggcattgtgggccttggaggctttcttgtttcatatcttctggcaccacaggtgactgttagtggcccaaaggatgtggaagactggtactaatcacaaggagtctcctaggtttcagattgtcctgtgtttgggtggctggctttgatgcagggattcttaagtctggttttctcatctactgcatacctactgggtgacctggggccagttactttgtgtctctgctccttagttcctccatctgtaaaagagatagaatgaccctggctctgtaaagatcaaatggagcccgagggtctttacacacaggttgtaaacttatacatgcagttggaaccgaagtctaccagttagttgtatgtatgaccttggtcaagttaaagttctttctgttgttgaagcttcagtttgcttatccataaaagggccccattattgggatcactgtttgtactgcttggtggtgttttgcaaatcaactaagataatgtatatgaagtgcttagtgtactgcacttcttggcacaaagtaaaggttccttgtcaacgattcctaatattaataataataatttgtctggactttcctatagttttttttttttttgtaaaataagttggttctagtcagtcatcctcaaggactatgattctacgaagtcacccaatggtgttcatttgacacccttcctgtatccagtggggtgctgcctttgtctcattgtgggttttcctctcttccagcgttgacagaaggctacgttggggccctgcacgagaatagacacggcagcgcagtgcagatccgcaggcgcaaggcttcaggcgacccgtactgggcctactctggtaagtccagttgttctaatggagatcacacaggccagttaacatcccattcaactcacttgaaagcacactttgaatcacttttatgcctgagttctgtttgctcaaatctttcgtagttcactaaaagttgaaatattcgagcctgtttttcctcaaggttataagcaccttaatttatctctaccacctgtttcctcaacctgttttcccctcaatttgcgtttatttctgaactttactgttaatgagttattgtaccaaacttgtaattttctgaaagacgtagtcttgtcttttctgttttttcaggggctgtgatttcagagagcagaaaatatatggctagtcttgagctgctaaatgtctgctaaacattacaaacatcacatatcagaatgctctattaggctctaagccaagaaatgcaactttatttttaaatcacatcttgttctttgaatatattttagctgtctactcgatggtaatctgcagtccttttcatttttatttttacttttacccttttgagctaatgaagggagagagcattgttctaactatgttgaatgttacattgcaaataattttcttacattttaaggggacaaaaatgaagaccgaaaactagggatagacttttctggattaggcttcccaaaactcccaaaatatgagaggtggattgttatttctagaagagatttttgatgctcaaaaatatatggaaaatgtattaaagctaattaaggaatgcttgagtaagatagaccactttggaaattactttggcactgaataattcaaactccttctatgaaagagcttggaggcatggagtattagtcttaataataaatctatgtattatgcaatgttgttgcatatagaactgaaagtattcttttcataatgatgctcgggtttaaatcctgaatttctcccagcaaatcctgttaaatttatgccagtgtaaaatttataggtctgatctttaattataccttatctattggctttttgcatccttttgtctattgataaatctgctgcccctgcagggagaatatcctatctgttttgttttgcagtgaacagatagtgattctgaagttttccatcacacccagtaccttgtgattagaattatctaattagaggctttttgtcaccatttctgataaatgaaggaaattggcagatgaaagccaaaattacatatatatagcatcttgccaagaaacccaaagaaaatttatcattttgtactctgtggctctgacatcagtcaggaggaggcacaaagtggcttgctatttacagttcatcagtttagaataataatgctgttagtcaggaaattggaagttatatcccattagcatgtccaattgcaaatggcagtgaagagatgaaagcccttaaacttttcccattatgtagttaagaatgaccataagtggtgccatctttgtgatggagtgattgttgatgtctttaactttggtagagttcagaagtctccattttgtatttctggaatgcattgtgtctgaatttgggtattgcctccagtagtagaaggactaatggttcaaattcaagagttggcacactttttctgaaaagatccaggtaacaaacatcaaaagccatgtcgtctttgttgcaactgcccaactctgccattgtagcttaaaagtacccactgacaattctggacagactggctgtgctctgataaaaatttacttatgaatactggaatttgaattttataattttcatgtgtcaggaaatattcttcttttgatttttttctcattcattaaaaaatatacaaaccattcttgctttgcaggctgtgcaaaaacaggtggctggttggatagggtccacaggttatatagtttgtgaacccttgttccagttgatttttttcctagaaatcagataggagagtcatttgaggaattgcttggaaggatgtggactggtttggaagactgaatgaagtcatttgttaggcataatggaaaaaataagagtaaaagaagaatagaatgggacagatatcaactgatggtataaagttcttatgcttgcaacagttcttcctgacaattcgacagtatctatggttggctcatgctgacgtggtgcagtattggttctcatgtcaagaaggcttggagttcatcacagacattccttagcatttggccaatgtgtaaacaaggccaggaagaagtaagagttggggcctgttactttgggtacatcagaccagcaccttaaaaccacagcaaatgagatgtgggactattagctgcaggcatagtcctctggatataaatgcttgaaaagtgggactgacaaaaaaaggctcattttttatgagggaagtgtttctaaatttagcaaaatgaagcaggcagttcctcaaagattgctttaatagtctagattttaatctgaggcctcaaattctctgatttgtcttatttcctcctaagataatgccatgggtgctttaggggtgcagtgtgtgagagtatgaattttgaagtcatatagacaaaccatagttcaaagcgaagttttgttaatatcttgatgatgttggaaaagtgtgacatgggaatgattaatattaatagcacttcccacataggattgttacagggattcagtgagatgatatttgtgaaaacattaacataggccgggcgcagtggctcacgcctgtaatcccagcactttgggaggccgaggtgggcggatcgcgaggtcaggagatcgagaccatcctggctaacacggtgaaatcccgtctctactaaaaatacaaaaaaaaattagccaggcgtagcggtgggcgcctgtagtcccagctgctggggaggctaaggcagcagaatggcatgaacccgggaggcggagcttgcagtgagccgagattgcgcccactgcactccagcctgggtgacatagcatgcctctgtctcagaaaaaaaaaaagaaaacgttaacatagtctctggcgtaaagtaagtagttaatattacttcttgcttatttttgagactgttattattacttttgctgcaattaatgttggttttggaatgcacaagtgtcgcgattgacagtgggtgatgactggatagttctgagagctgaacaagttagattctctcagccataattctcaaggggtgcttagttgggatttgggcatgagggttaagcagactatcctcaagttcagtggttggcaaactacaaactgcagctgtgttttgtaaaataaattctgctggaacacaagcacacccatcacattgcatattatctatggctgcttttgtgctacagttgcagaactgagtggttgtgacagagacctagaatgttactattccagtaatgttgaatatctagtaatattgaatattaaatatctagtaatggtgaaaagcctagaatattactgtatctggcctcttatagaaaaagtttgctggccgggtgcggtggctcatgcctctgatcccagcactttgggaggccgaggcgggcagatcacgaggtcaggagttcgagacctgccaacatggtgaaaccccatttctactaaaaatacaaaaattagctgggtgtggtggcgggcacctataatcccagctactcgggaggctgagggaagagaattgtttgaacctgggaggtggaggttgcagtaagctgaaatcgtgccactgtatattccagcctgggtgatagagcaagactgtctcaaaaaaaaaaaaaaaagaaaaaaaaaaagaaaatatttgccaactcctgcttatagtaatatagcctgggtttttagcagatgttagtctggtataacttttcacttctcattttaagactagcctactttatttccacttcactgcatcaccttggaaaatgcagacaccttatttatttttgaaatgttaaactttacctttataggcctatcaaacaatgcctttgtgaatacctgtaattttagcatagagaactatttattgaggaacctggagatatgtattagagttctcttgtggtcactggaagatttgttgtttctctggatcttaaatttcatctgctagtaaaaaagggggacataatatctgattttgacatgaaaacatcatagaaggtatgaaatggaacataaatataagttattgttgacataataatagcaatgtaatttgatgattgatttatatctttggatttctttttccttgtaccaacatagtaggcaaaaatgggaatgagttaagtttcatatagaattgtactgaaaaaatgcagtagtttaatagtatctcattggaaataataaaacaatttcttttctattaattttactcagttaaagtatatttctgtctttcttgaggtgatggtagctcatgaattttggagtttgcccagaacttctataattattgcacaaagagtaacacatgctaggcaggtcatcaatgcaggaaagagaaatgaaaaataaatcataaatctagagtaacttcaagtagaaatttgagggttttttttttttttttggagattggatcttgctctttcacccaggctggagtgcagtgcctcgatctcagctcactgcaaccccccaaccccctgcttcctgagttcaagcaattctcacgcttcagcctctcaagtagctgggattataggtgtgcacaatcacactcccagctaatttgtgtatttttagtagagatggggtttcaccatgttggccaggctggtcttgaactcctgacctcaggtgatcggcctgtctcggcctcccaaagtgctgggattacaagtgtgagccaccacacccggccagaggcatttttatatataaagttattttctctcttgccactcaaagactagagaaaaacaggtggtagtttcttcccttcctctgcttttttttgttttaacttaattctgtttcatttttcacaattttaataatctctatctcattttcccctgtgtagaaatagcttctaagaatcagtacaaggagaccatttctcattgttagagaaacccagaattgaaataggcagtgaccaaaattccccgtaagacatttctggcattgggctgggtgaaggtcaagcaggattattctaagaggcattcctgccatagccaggggccatccatggtcctctccaactgtcctgggatttgaggaattgctcagctgtaaaatggagatggctttgaggattaaaggtaatatatattggcacctgtagtatgtactttttggcctccaccctggagtagagtaggtattacctgtgtggctcttcattatatgccacctcactacactgttcatataaacatcttgttttataacatgcatgtgtgtgtctgggcgtgtgtctcatttccccggctaagtgtagaatccttgaagacaaggattattgcttataattccttgtttctcctgcagcgtgccagtgtgtcttgttttgtggagatttggtgcatgtttttcaagtggacaagtggatacacggataaattaactcaagccagagtctgtccttgggaatttactaaggggagtcctgccatgaaattcagataaattagtgggtgatttgcaaaaggtttcactgttggatccctttaaataacaagctcccctggtgaacttaagatataattaaattcctaaaattacattttcatgtctatttttaagaatgtctgtacaggataaagcaaaatatacgtgcctgcagaattcagcttttgtcattagaagaatggaaggcactgtaggacctcaaatttaatgttaatattgttgtgttatttgcctctctcctaaagcctcctccaaaatctcttaagggaatcatttccttagagacattctcttcctaatagagacctccttcttcttcttctttttttttttcttttgagatggagtcttaccctgttgcccagatctcagctcactgcaacctccgcctgtcgccctgatctcagctcactgcaacctccgcctcctgggttcaagctattctcctgcctgcacctcctgagtgtctgggattacaggcatgtgccaccacgcccgactaatttttgtatttttagtagagttggggtttcgccctgttagcaaggctggtctcgaactcctgacctcaagtgatctgcctgtcttggcctcccaaagtgctggggttacaggcatgagccactgcgcccagccctaatagagaccttctgatcggaaggaaccacaccactgaggaggaatcagccttgagagtcttcctccatgtctcagctcaaaggctccctgtgccttggtgcttagcctgacccatttctgcctaaactcctcagtctcccctttatttatttttaaaattaatgtttatcttttctacatatccctattaatcttacagttttaaagtagaatttctttacttatttgtttaccacacttactaattgtctactgtgtgccaggtgttgtgctaaatgtgaagggccagagaagctgcccataaaattgctgttgccagattccagtcttcaaagacaggcaggtgtttgccaggacacacataggccttgagcctggagggctctggcagtgattagagaaccagaagcagctcagaagctctagagcatgtggtcgggtggagaaagttaagggcttaatgaagaggattggagttagactatggacagccttatgatattattctactagtgacatagaacttctttctaaggatgatagggagtaattaaagagcttcacctggaattggactacagttggttttatgtttaagaccactggttgtagggttaaggactgggcagtgggaggaagagggcaggatgaaaaatgatggggctgtatcactggggatttgagaatgaaaagaaaagagctcatgggaattcattatcgtttgtacaaggaggagaaggcaaaatgaattgttgtccccaagatgattgaagatggcattgcatttgttttgaaataagtaaatgaggagtggtgggttggttgaaaagatgaagaattttgactagaacctattaagatgtgttatagtgttttgtctgcatttcttatgccctttagagttcatgctctttgaacagaacctttgtctgtaattagtcattgtatttccctgttgctacctaaatgtttttggataggagggcttcaagatagagaacaaattgtagaataaactgtttcttcctacagatactatttttcttttatagttcatgtgtggttccaagggtagatggtgtaagaaaaaacacatatggtcacacactaatcagaactttatgtacaaaggagaaaaatgtgttgccatatgcttaaggtacctggagaatttttcaatacttggccaagtttgggaattgcctctccagtgtttgaaagacgttgttctctctacttagagttcttttcttattttttttaaactttcatccttggcacctgagttctaaagtttcttggcattttctctgtggaggtggtttcacaagtgattgtaaagttaatggatgctaatgcattaatatattatcagaggacatgaatacattccttaggggccttgtgaccattggaaaagtctagcagtaagatgaaatactgtttagtgctgtgttgttatcaagtggtacatatcagtggtaacaagatttcaattgttgctgtgatggggtatttaaaacatgggtaaatggaatactgagagtttgggttttaaagtgactctgaaggtagtggggtgatggatcctttttggaggagagctttttggcaatatctgtgaaaatgttaaatactgctcatctttcatccagcacttctgcttctcagaatttctctttctgaaacacgtgtgcatgtctccaaagtagcattgtgtttaacagcctaagtgaccaaaatagggacttgggtaattataatacatgcttacaatgaaatgcttacctgaacatccaccaaaatggaggaggttgaactacaggatgtattaaaataatatgggtaatatggtcccattaatgaataaagctgaagaatccagagactacacccaaaagttaattgcggttatcattgagaaatgagggatactaccttttaatacttatatttctataatattttaatattttatagaagcatatctagaatatttcaatttcttctaccagtagattcataattttttttaatgacctttttattttagagtagatggctaaatggtatcaaattcaggcagttttctttgtaacaattttgagggggagaaaaagaaaaaaacctaaaagggaagccagaaggaaagcaaaaacctttttgtctctttaattggctgtatctaaattttttaggtgaaacattgtcagtggcatttcatttttttataaaatgctgatatgaaccttgcagaaattaatgaactgatattgacttagtttgaaatgaacatcaagatttattgagcaaagcagtaaatattgacccagccaaagataaggtcaatatttactttgacatagcataaatcctaatattcattaatgtataaatttattgtgtcaacacaaggcatacagaagttgtatataaatatttttttcatatctgcgatgaatcagagtcaaacatcttttttcttggttataaatttaaaaggacaatgttctcttctttgaaactaccttctttggggagaggggtgtgcgcgtgggtggaaggacatgattaatttaaaggttcaaaggaaaaatatacctagctgaatacatgtgttataattagagcacagtgatttgcatgtgctctgtgatttacttaagggctaccagttttcctttctaacctaacaaaacgttctctttcattacatctgatttgattcataaagcccacccacttcttttttctttctttttttccattttttgagacaaggtctcactctgtcacccaggctgaagtgcctggtactgactataggcgcacaccaccacacctggctaatttttgtagagttgagatttcaccttgttggccaggccgatctcaaactcctgggctcaagcccagtattcccgatttagcctctcaaagtgctgggattacaggcatgagtcagggtacccacctaaaacccaccttctgatgatataaaacggggactttctgtctttccctctggatattgttaaactacttacgtagaattttgtttggtaaataacatattgttggtgtatatcatactttataatactttattggctgaaatttcccatgttgaaattatcttagtttattattattatttttgagccagagtttcactgtgttgcccaggctggagtgaagtggcacaatcttagttcactgcaacctctgcctcctgggttcaaacaattctcttgtctcagcctcctgagtagctgggactacaggcgtgcaccaccacgtctagctaatttttgtatattttagtagagacggggtttcaccatattggccaggctggtctcgaactcccgacctcaggtgatccgcccacctcagcctcccaaagtgccaccacgctcggcttcatgttgaaattatcaatttgagttgaactctcattctttatcttgtgccttctcttggtggggtggtcttggtagcagtaagaagaacgtaaggaggacccatttcactggattgtgaacttttagaattgccaatatgtagttggaataagtgtctaatatatgcttaaagactgaattttctcgctgttcatttaagcgaagaaagtaactcagtcacaagcttaagtataatcttgtccctatgcaatagtcttatatgatcctgttgtgctcagtccacctggcatgttctttgagtgtaaagtggtggtgttagtttcagtgtttggctgatcttgaaatgaccatcacttctctctctcagctggtaatctcctatgaccctgtttgagatcagctacctgaagggtggttatcttcttggttgtctttcttgctattaaaacttaactgtcctatgtttcgtttactttaaggcccattttctgttatgtaactgataacttgtgtaggttaaaaacttatcagtggtgtgtatataacatagaactttgccttcttgagaaatgctttctaataacttcaggaattctcacttttcattcatgtcactatagtatataataatgttttccactgcgtgtagtggctcacacctgtaatctcaacactttggaaggctgaggtgggaggatcacttgagccgaggagttcgagaccagcttgggaaacaaagtgaggacctgtctctacaaaaaaattaaaaaattagctgggcatggtagctcacgcctgtaagtcccagctactcggaaggctgaggtgggaggatcgcctgaacccagtcaaggctggagtgaaccctgatcacaccactgcattcccagcctgcgtggcagagtgagaccctgtctcaaaaataataataataagaatactaacaatgtattccttgagtgtagtattcattggcatttttatgtcatgtgaaaaatgactctatgactctcctgtgatacaaatatttgactttcacataataaagtcatttcttcttgaggttttttttttttaaatcaaggagaaagtgagttttgtactaataggtctttaacatctctctgtcacttgctcatacctctttttatcaagaagagataggactgacctcagtctgctgggagagtatcttagaatttgatctcgtggatttcattataccctggtacccttcatgtctggcaagccatgttagttttccgttttgatgtgttacatttcctattaagtcatatttgagattttataaaaagtgggccagtttaaagaaaaattttatctaagcagtagtacagctggctttccaatatggcaaaataagtctttctgtaggagatatcaccattttggcaggattgaaaagcctcttgttttgtgccatataatcaaactatatctgtgatttgaaaaatgacaaagggtataataattcctagaattggttttaaaatgaaggaaaatagtatcctagttcaaaagttatggctcattgtaagtgctggtctggtataaccatacagattgtttaaaatctttaaataaatacttggcccaatcccttttgttccccctttctcgctgccctggaaactccttctcttattttgggaccttttaaaaatcctaccttagacctgtaaacccactctgtaccatctgctgtgactgattattatctctgatttgttaaatgatttaagtttcatttctgcttatcatgacttggagggaatttcagagtgataggcctgacttggtagggttttgggatatgtattatactctgcaacccattcctttgtttttttacattttattttaagttcaggggtacttgtacaggatgtgcaggtttgttacaaagggaaagtgcgcctggtgatttgctgcacctatcaacccatcacctgggtattaagcccagcatgcattagctattcttcctgatgctctccctcgcccctccctgctctccaggccccagtgtgtgttgttcttttccctgtgtccatgtgttcagctccctctttaagtaagaacatgcagtgtttggttttctgttcctgcattagtttgctgaggatgatggcttccagcttcattcacatccctgcaaaggatgtgaatgaaggatctcattcctttgtatggctgcatagtactccatgatgtatttgtaccacattttctttagtctatcattgataggcatttgggtttattccatgtctttgctattgtgcacagtgctgcgatgaacataggcatgcatgtatctttgtaacagaatgatttatattcctttgggtgtatacccattaatgggattgctgggtctaatggtatttctgattctaggtctttgaggaatcgccacaccatcttccacaatgattgaactaatttaaattcccaccaacagtgtaaaagcatttctgtttctctgcagcctctccagtatctgttgtttcttgactttctaatcatcatcattctggtcaggcatggtggctcacgcctgtaatcccagcagtttgggaggttgaggtgggcagatcacttgaagtcaggagttcaaaacaagcctggccaacatggtgaaacttcatctctactaaaaatacaaaaaaattagccaggcgtggtggtggacacctgtaacccagctacttgggaggctgaagcaggagaatcgcttgaaccctggaggtggaggttgcagtgagctgagattgtgccattgcactccagcctgggcaacagagtgagactccgcctcaaaacaaagaaacaaacaaacaaacaaacaaaccgtcatcctgactggcatggcgtggtatctcactgtagttttgatttctgcaacccatttcttgaattgagttgatcttgagagtttccttggacacgggaagccacttaatccagatttcctatttctgttgatccacattcttccagcttgaaagcctttttctgggggaggaaaacaaccttcttcttaaagctgcatgaaattttgctgctcccaaaggcatcatttagtagctctgccccaattattgttggccacttttcctcctggaaactgtttttctctgtcccacccttccccctagttccaaatgttaggctgatgttcttctttttagcagagtgtgcatgccattagtacactgagtattgattggtcattgagagattttagcaggaaaatgaaatatgaagctcttcttggctgttggactagcacctgcaaagatgagcgaaggcatttttagtgtgtttctggctctggggctcactgtgataatgggaggtattttcttctcgctgttgataagtacatggtccacactctcctcttggggagtgattttgacactttttgatggtcctatggcttttacattcttataccatttcctaatgagttatcttttctctcaccatctactagggtgtgaaaagggagtttcaacactcaaggccaattgagctgcatacctgctgtgccagaaagaacgagttaagatttgcttctggctgggcatggcggctcatgcactttgggaggctgaggcgggtggatcacctgaggtcaatagttcgagaccagcctggccaacgtggtgaaacccgtctctactaaaaatacaaaaagtagccgggtgtagtggtgggtgcctgtaatcccagctacttgggaggctgaggcaggagagacgcttgaacccaggaggtggaggttgaagtgagccgagatcatgcccctgtactccagcctgggcagcagaacaacactgttgcttctctttgacgtatgagtacaccatagctagcaatattactaggatttttctcctaaattcccacggaagtcatttccgggagtatgaatgagtataaggatttgtttttggatcagttttagcctctagaaaagacccccttactctcctggcctaagcgtaagggcagtttatcgccttacatagcacacctagggtaggacacctctgggcagcacctttgtaccctgccatctttaaggtacaccccatgttgtttaggctttgccatccttagtgggtaggcttggtccttagaatcactttccctgtgttcttaacatggcttccagaattctagatgtcaaatactgagtacaaagttcagaggagaaagggaacgtgtccctttcttatgtctctgttgaagagcatgtaacatgttcttcaaagcatcccacccctggtgaatcagccttcatattttgttgtccagacttggatcgtgttctcatgcttaaaccaattattggcaacaggaatgggattagcactgctgccttagactgatcaggatctaccccgaagtagaggtcctggaaatatagcccgtgtggctgctacctatacctacccttgtcatcattttcaggtgtttttttttttgagacggagtctcaccctgttgcccaggctggagtgcagtggcatgatcttggctcactgcaacctccacctcctgggttcaagtgtctctcctgcctcagcctcccaagtagctgggattacaggcgcgcaccactacacccggctaatttttgtatttttagtagagacgggtttcactgtctgccactacagcacctcccagtttcaagcaattctcttgcctcagcctcccaggtagctgggattacagactcctgctaccacgcccagctaatttttgtatttctccttcgttagagatggggtttcaccatgttggccaggctgctctcgaactcctgacctcaggtgatccacccgcctcagcctcccaaagtgttgggattacaggcttgagccactgtacccagcccattttcaggttttaaaggctaacaaccccatggcacttaataaaggaaaatgttctaggaaagaaatgtgtttacttttgaagtgaaaatttgatttcaaaagcctgacatcactgcaaataaaataataaagctccatgaatttggagtcctttatggtattcctagcttccctgtactcttctatagttactagttacatttggctatttaaatttaaattaattaaaatgaaataaaatttaagattcagtttctcagtcacactagccaaatttcaagttgtcaggagccacacatagctactgactacccttttgtattgcacagatatgaaacatttccatccttgtaggaagctctatgtgacagtggtgttcagaggatataggcattatagaggaaccagcaggtaacatattattgagtactgaagatgtgggtataagacctttctgaaaagcttgtatagtgccccagttgtacaagcttctaaaattcaggtagacctccctgttccttttggaggtcttgagaagttgacctagggtatattttctgagccttgtttttaccaaggttctgaatctttggagaaatacagtgagtggagcgtagaagtgaggaggcatgagggcatcctcataccagtcttcattcattgagtcattcagtaaaagtgtttatcaagcacaagccaggtggcaaactcagttcgagattagggctaactacaacagagaacaaaacatacacagttctattcctacctggtggaggtggacagagcagcatatacaaagtaacatgtagtatcatcacatcattctgtgaaataaagtgtaaagtgaggtggtgcctagagagggatttaggggagagagttgttattttagcctgggaagacctctctgatcaggtgatacttgagcagacatctgaacacagagggactgagccttgtggctatgtgaggtaagcattgcaggtagagggaagcgggggagataatagcacttggaaaggttcaatgttataccttaaactactctgtgaattttaattaggcctccttctagaaccttctggccctgtattcttgcttaggataaattttgcattgttctagagaagtagttctcaagtggggactctttcctttttgtggaatatctgacacagtctgcagacattttttggttgtgacaattggagatggttgggtggccaactggcatttagtgggtagaggaacaagatgctgttgaacatcctacaatgtacagaacagcccccacaataaagaattatctggacccaaatgccaatagtgccaagattgacgaaccctaaactgaaggctcaccagaatccatcgtttttacacagttggtctccatgctgctgtgaggttctacctttctagccagtccttaattgaatgagtacgtggcacaaacacagcaaggtgtgttgtgcacagtggctaaggtattagagaataaagtgagtgtcatggtgttcaatcatctttggagattaaagagtagaaatggaaagcttggcaagttgaccatttcagaaatctgtgcatgaaatcataaaggaatgaatcacacttctggtcgtggtgaaaagcctacctcgtaatgtcacatggaggtgatgaatgttgattgtgctgcagtaaagaggtggtgagattgcttttattattattgttttatttttgaggtctcttgtgactatgccatttgtcaactctttgatctaagaggccgttaggaaataatattcatcttagtattgctaaccatgaaggaccctaaaggatcagctggccaagcccctacagcaccctgagaaaatttatagttacccagttgtgaaccttgacatgtcacttcagggctggcagggaatagcagtttcttaaatgatcacttttcactaaaggagtggaaaggaaaccagagctgtgaatggtgattgacaggctaccgtgatccagctttttgtcaagtgtcagcaccttaatatttgataagggttacataaatgtagtagtaatggccacagatatcttccagaatagatttctcacttttttgtataaattaagcaaagctaccttgtgatggggtataaatgcatgtatatttatctacacgtgttatggtggcctgaattttccacagagcagatggctgtttgtactcatttgttcccaaaccctcttgtagatatttgagtataaagatagattcatgtggtcaccgcttctatggagctcaaaggctctctttctcttttctctattgaaacccaatttttattagcattgaaggccactgacgttgtaggttaaacataaaaacgtctaatatatctatctcaatactcctattgcaggtctacgaggagtttgaaaaggtgtaagattatttatacatcagagtggctcagaaatactttttctttaaattggaatgataatatcataccaaaagtattgatatatccatttaaattgtgagctgtgaatgttattccatcttccttcattcctatacagtttcgagctcaaattggagaaggtcatgtgaaaaccacttttctccccaaagaaatgttggcattattttaacatctttttcctaccctggattctttctcacatcccagactaattccaaaagagtttcttcagtcactgctgttgacaagagactttatttttggagataattttttcttgttaagttttctttcttagattttgattctaacatctctaattgataatcacattttccagatttctatctatatattaaaggagtagatctggaatttcagctctctttagtagactgcattatagaaaggaaactttgttcgtatcacacatgtattatttaacaccattattaatgttaaaaaaaattttttttttttttcgtttaagacagtctcaccctgttgcccagattggagtgtggtgtcataatctctggtcactgcaacctccatctcctgagtttaagcaattctcctgtctcagcctccctagtagctgggattgcaggcatttgccaccatacccagctaatgtttattgtatttttagtagagatggtttttcaccatgttggccaggctggtctcaaactcctgatctcaaatgatctgcacaccttggcctcccaaagtgctgggattacaggcatgagccatcgcgcccagcccagccattgattattaaacatgttacttagaaagtagaattaggacaggagcactggctcaggcctgtaataccagcactttgggaggccgaggcaggcagatgacttgaggtcaggagttcgagaccatcccggccaacatggtgaaaccccatctctactaaaaatacaacaattagctgggcgtggtggtgcacgcctgtagtcccagctacttgagaggctgaggcaggagaattccttgaacctgagagacagaggttgcagtgagccgagattgcaccactgcactctagccttgtgacagcaagattccatctcaaaaaaaaaaaaaaaaagaaagtagaattatcaaactccatttttttaactaattttttatgttaaaaaaggcataccattttcttttactctcattttgtttttgcttattctagtacatgatgatttccttgtagtaaatagttttttctaattttccccatgtagacaaatccaaaatgcatacatgctcatttaaataatttgtccactggtaacctcagctgagcgctgcccttggcagaatatgttttacaggatattaaatgtgtttaaaatattctttcatattaattggttggcatttagatgtcttaagttgttttaataaattagggaaagctagaatataaaaggtagaaaatatatacattttcagtgttccaagacactttggtggactatagaatgctttaaatgcaagttaagatgaatgttttatatttggctgggcataatggctcatgcctataatctcagcactttgggaagccgaggtgggaggatcgcttgagcccaggagttcaagaccagcctaagcaacatagtgggatcccgtttgtaccaaaggaaaaaaaaaatagctggatatggtggcacacgcctgtagttccaactactgtggaggcttacataggaggattgcttgagcctgggaggttgaggctacagtgagctgtgattgcaccagtgcactccagcctgggtgacagaaagcaagaccctgtctcaaaaaaaaaaaaaaaaaaaaaatcttggtatttaattttgatctctcactacggaacagaatagatttatgcattgggaggataggaaatataataattagagatatattaattgattttagatttttgtctgtaaaatactagtcataaatgcagttactagaatccatgtttatggtctttgaatttgatcaagacagagagttattcatcaaaaagccactagacccaccatttatcacaactaatcgtgaacttatatctctgtaactcacaggtatgatgtatgtcttttttttggtagggatatttactacaggaattaatttcagacattgggagacttttatagccatttaactgttagctacctagagatttaaataattttcctggtttctctgtgttagcctctgggagtagagtttctctgcacaaaaagaatgtcatcagtacagaattgttggagtctctctttgccagcctcagtactgagtctgtgtaggaagtccccggcaagtagctaagtatgggttgttgctcggagagcattttctcaaaatctgtgtctggaacattagttgaggaggctgttcacaggctttttatggcaggagggttctgtgaccatggaagattgggaaaggccaaagtaaagattgtcatacaggtttctttgctgcaagacttctcagatcctttaatagtccactcttaatagaattggaaacttgtccttcactgtgcacttagacgtccgattagaaagtgagggaaagaggaaaatagttgtgtgggggagggtgtgtttgcccagggaagaggggtatgggggaggagaaaggttgattctcctgagttggctcagtgtctactatcataatgatttccccacagctttatgagggctgtgctgctgttgtgaggtgtggtcacagggaaatttcagtctgaaagatgagttccacatgattcacacacctcctatgaagtagtaaaaggaaaaactatgccaatttacattagaagtattttcctttcttctttatttcttggaaatggagcatttgtgtatgaaagagttccttgggggataaaatgccatttagtttaatgtgatgacaatatgtatttaagtcaccatatgaaaatatttactagaaacaatgacatttgaatttatggacgtgaattttgcgtaataccttccttaagagggtgatgatatatgggagtgtgggatggttttctttcactgaatttgggattaatagaattgtcacccacaaatgtttgttttttttgtttttgtttccatatagggttttactctgtcgcccaggctggagtgcagtatactttggcccagtcatagcccactaaagccttgacctcctgggctcgtgattgttccacctcagcttcctgagtagctgagactacaggtgtgtgccaccacgcctggctaatttgttctttttcatagagatggagtctcactgtgttgcccaggctggcctcgaattcctggccttaagcgatcctcccagcttagccttgcaaagtggtgggattataaatgtgtgacaccacacttagatgcccactaatggtttggtgaaaggattaaaccccccaagaactgaattttcagtaataaggaattgaagattttagtcaagccagagcacacatgattgaacttcagcagtgagggtaccaaagaatattacatttggaaattaaattttaagagagaagaggaaaaaaactgggcgtagagagtatggggagagaataaaatatggtgaatatggtgatgtgattcttgaactgtccttttgtttttttctgactgtaaagagtagcacattccccaattagacaatcagaagtgttttcagatgttcccacctatcccctggggagtcaggggcagactcctttttggtagagaaccctctgctgtagaacgtgcaagaaataataataaatagtaatagtatggaagagtatagaattattacatggtaaaggtggctgtgatttttgacctgataagcttatttagccaattccagaagtttccttattgcaaagtgggcggattttaagtgttccttaccaattgttaaatgtggtgagatggattttatttcccttggattcgtgctatatctgccatggaaagcctgggtggtgttgattgtagctcagattgaaaatgacagccaggagttgcttagttaatggggtatatgttggtcctcaatttgtgcaattcattgtttaatgtgaatgaataatttagggatgaatgattgggttcatttttagacactggctaccttaacaggatgatagttgacagagcttcatgttatatttcctcacgtgaagagctaaagttgttgcccaggttaagtcaaaacattagacaaggtcataatgttaattatttgaatatgttaaactgctgaatatacatacgttggtgcaaaagtaattgcaatcttttgcaccaacttaatatatacacaagtgtatatatatttgtgtggtggtaggactaattacttaaataatttttctcaactttgcatatacttttttcttcctgcatttaatctagtttcatttggattatgtctagtttctgtggaagtagcttcataaataatttaaatgatctttgatttgagactgactcttaaaaatggaaattgcatttatctgggttagaattttatctaggattttaatttaatagctgttatttttactttcaaattcatattttaatacaattaaaagttgggttttttaatttggggacagacagcaagctgttttattttatttttgcctgccaaggaatgctttttccttgacacggacaagggtgctctttctttttctgttctagctctcctgtgtcttggacttcttaattctttctggtgggatttttctcccttccttctttacctttcactagagatagagttatcctttcttctggctcttgtttccctcccaagacagctacatctcaccatttgccttggcctcctttatttctccttctattcatcttttgtacttggagtggtccgcaaggtgaggagagttgagctcaatgaaaagaaggtagatttttgccttttttatgcagaacaatgtcttcaaaaaaatcagaacagaaaaaataagatgcattctaatggatctttgacactttttggtaatgaagcttttagttcccatagagttgtgtgtaggtcagaaaatctgccaagtttcttactctatgttcagctcaagtttgctctggcaccaaagaggagagaaacggggggttgcagaaaacagggggttgagagctttatctttttgtcctttactttcatctaaaaaaaaaaaactttctatgtaagtcaaaaggcatactaattttatatttcagtgtttctttgagtttcatttagaccatacaagctgaccatgacatatgacttctatgtgttcagtcacttaagatcatcaaatgcctagactttttatttgaaatctttggcatcccttctaacttgtgttttgcagttaaattactttggagatgagatagaaatctgaaccaaaaataattattgtaactatgcaactcttatttcctaccttggcttaatgtgttcctatgtgaactgtgtttgtttggaacaatttaaaaatatatctcctctcatcctttttctttcctgaaccatagtaggctttggtgagcagatatgaaaattgtgatgaccaggctgggcacagtggctcacacctataatcccaccactttgggaggctgaggtggcgggtcacctgaggtcaggatttcgagaccagcctggccaacatggtgaaaacctgtctctactaaaaatacaaaaattaaccaggcatggtggtaggcgcatgtaatcccagctactcaggaggctgaggcaggagaatcacttgaacctgagaggcggagggtgcagtgagccgagacgatgcctctgcactccagcctgggtgacagagtaagactctgtctaaaaaaaaaaaaaaaaaaaaaaaaagaatgaatgaatattgtgatgatctctgaatcatcttcatgttccttctttgccaattcccatcggggccaaccagggacaaactcaggacttcctgggaaattatacagttgagggagggcgttaagcagggaggtgtaaaatatgttcttggagactactttgtctaccagaatctgtgaagcactcgtttagtgttgaatgaggaatttaggaatgattggcctttgttgctgccaatcatggtgatgtgtgtataggattatcaaaatgtgttacaaatcaacctgctcattcacattactccttttccgtaatgtctaatttttgtatcattaatatttttatattttataaagtataaaatattaatattgattttcttattatagctgatcaatcagtggaaaaatgaataatgtaacctgctattcctttcccccaagcctactttcctgagatcatgattataatctttgtacatacactcttttctttttttaagcatttgcctttggtgacatcattctcttcacaatgtagagtagatatccatctgagtcaatacataaaaatccatgtttttaaaaataactgcatctgttctgcagtgtagatagaccatatgttattcaaacatttccttcatgatggacattcactttgtatcaagctttttcacactaccaaagcactgcagtatctatcctcatgtgctggtgcgtttatttttgtaggagagatggtcaaaaatagggttgctagatcagagaatatgctgtaactttttcccgtgtccttcagtatggggattttcagatttgattatttctaccacaacgaatgggagaaatgagtggaactccataataatatagactgaaaataagtgaattgatcaacaatgaaggaattgcttttagaggcaacatttgaaaagcaagaaagacaagataacatttgaaacattagatgttggtttgctgaacttaaaacaaaacatgcaggtgtctatcttaggaaatatgtgtgttatcggctggtgtagggtagggtggtggtaggtttgcagaggggttgaatgtatgcaataaattatttggaagagtgtgttattgatgcagtcaggtggaaattgttcagaaaaaaagtgacaaagaccatacaatgatagttaattactaattagaaatttagaagatgaaattttaccaggtagaatatttgagaaataaaagtgatctgttgcttgagctgaagaggaagaggaaagataaacgcctaactacagaccattggtagcaatgtaataataataaaagattccaatttgatagaaagaagtggtgaaaactttcagggatgctgtggatttggaagatcgatacatgtggccaaaataaaagacttttgggattggacatggttattggataaataataatgtattgagcatttcttttgtgtaaaagtgttttaggttagtaatgtcttttaattcctcctatcagtcctaagaggagagtatgattactgctgttattatatagctgtgaaaattgaggttcataaagaacttgtccaaagctcactgctgtatcctgagatctcaaaaaagagcctaggatgctgtgtatgcttagggaaaaaaaattgtcatgtaaataaaaaagttaaaaccttctcccccattgactttttttttttttgagacagagtcttactctgtcacccaggctggagtacagtggtgtgatcttggctcaccacaacctccgtcccccgtgttcaagcaattctcctgcctcagcctcccaactagctgggattacaggcgtgcaccaccacgcgtggctaatttttgtgtttttaatagagatggggtttcaccacattggccaggttggtctgaaactcctgaccttgggtgatccaaccgcctcagcctcccaaagtgctaggataacaggtgtgagccactgtgccagcccagactttttcattcattccaggcttagagagtatctaagagactacagtcctttcccaaagttgaccgcatagaacacagcaaagcatgacattgaagaaagattttgtcaaaaatcgagttaattctcaagtacaaagtgcagatgagtttgatgactgaggggttcccagaatgggagacattcatgctactctggccagcacaccgggaatgtgtgcctgggaccaggagtagtagttattcatttatatgcattcagctaatcatttttgcagacgattgcatgaatataagtaccccatttggagtttgcttgctggcacttgaaaatttggctgtcttatatatacgaaatgtgagagttggtactggaactgttgcataagagtccaaatagtttacaaatgcagtgagatcaattgcagcctaaccagagtagcaccagaggacaagaaggccacaaagactctggcaacttcagttggatgcaaatttcaagtctgttccagtttgttttctgtttaaaaggctggatgtgtcttgcacactctcttgggagatttcaaagttaaaattattgttttataattagcatcaatataatcgacttgagaggaatgttgcatggattagtgcatgcaggcagcagggagtgaaggatgcttgcctaccggtgtctctgcttcattcctcatccacatatggctattgagcagcttctcgggttgttaagaaaacacagccttgaaaaggttattagttaaaacaagatgggaatggacgactgagtgacccagagattggactgtgtttgaccttttcccaaagtggagaatgtattcttttgtaatgcccactgtatccacttcaagttgcacctctttctctgtgccttccatacttctgaattcccaacaggtgacctccttcccaaccccagttaatttttttgactcgtatgtgatggtgtgtgacattttatcccttaaagaaaattgttgttgttgttgttgagacagagtcttactctgtctcccagactggagtgcagcggcacaatcttggctcgctgcaacctctgcctcccaggttcaattgattctcctgccttgctctcctgagcagctgggattacaggcatttgccaccacaccgggatactttttgtatttttagttgagatggggtttcaccatggtggccaggctggtctcgaactcctgacctcaagtcatctgcccactttggcctcccaaagtgctgggattataggcatgaggcactgcaccaggccccttaaataaaatcctttcagtaattttaagcttgcaagactgtatgtagcaaagcttgcaatgcaacatggcctgctttggttcctgaatatgggcagatgtttttaatcgtattaaaataatgttacgggagaaatgctaacctcataatggaaatcttctttttgataatttagtcgatattaaaagacaaactgagtcttaggaaatgctcaacaatcctagaaatagcttcatgtaaatagtttgtttccatgtaaaacaaacaccaaaggtcttggctaagaaatcaaggttctgcaacccaaatgtccaacaatgatagactggattaagaaaatgtggcacatatacaccatggaatacgatgcagccataaaaaaccatgagttcatgtcctttgtagggacatggatgaagccggaaaccatcattctcagcaaactatcgcaaggacaaaaaaccaaacactgcatgttctcacttataggtgggaattgaacaatgagaacacttggacacaggaaggggaacatcatacaccgggggctgttgtggggtagggggaggggggagggatagcattaggagatataactaatgctaaatgacgagttaatgggtgcagcacaccaacatggcacatgtatgcatatgtaacaaacctgctcgttgtgcacatgtaccctaaaacttaaagtataataataataaaattaaaaaaaaaaagaattcaaggttctggtataagtcattgcattggtcaggttggtctgacccctcccacatctccaggtttgtatctagaatgttagcatcaagagtgagtgggagcgtaaagaatactgtttgctaagggaatggaactgctggccaatccagaagtctttggtcagtttatttctttgggtgagtgagacctatgagcttgacttacttccttaaaggttagatgatttttttgaccccaagttctcatttttattggaataaaaaaattagttgtatcgcatagattaaaatcaacacaggcgctttcccctgctgtgcgaaacactctttgaaatcccaggtgtcactttatgcttatggtaagaacccgtttgtgtctgttgttaattattttctcttggtcagaccagttccccagcctcagaaaatttcagaggagaaagtacatccatagtgaactgggaaagtactttctgtcctagaacttattagggcggcacctagtttactacacaagaaattctatccttttaactggaacatctgggttcttaatgctctctgcttgcaattatctgtagccttatattttgccacggtctgtcttgtcattcttgaacattctccatctgaatgctaatttgcacacattctgtaattgtgtgtaactgtgcttcttcttgtgtattaaagtcctccctgtctttaagagtaacttaaaaactacttctttgcctaagtgttgccagattttttattttgctccaccccttaatttgaattaattattgcacgcctgtataactttacttactatttctgcactgaactgtagctaactattgactggtatgttttctttgcatactggtttgtgaaatttgtgggggtcgaggttcaagtctcattcctctttgaatctttcctgggcctagatcagtactgcatatgaagttctcaaataaatatttgaagcatttcgttgaattgtgtgtctctggaatatcagaaatgacatttctcttagtcaatacctaataaaattttactcggtagctttattttttaaagatccatacaagtgctgtccaacagaagtttctacaatgatggcaatgttctatgctgtgctgtctaacacagcagctacttgccacatgtgaccatggagcacttgaaatattgccagtatggctgaggaactgaattttgaattaaattaaatttaaatttaaatagccacatgtggctagtggctaccatattgtacagcaaaggcagagaaataagctttcaatcttgatcttttcctctttcatttcagcaatctttattaagcacctattaggtggcaatacattttctaggccctgggaataccaagatgcattggttaattccaggactgagacaactgtcacggtactgcagagagatcaacaggatcctatcattcattaacacaggacagtaaatgcagtgctgttagggttagcagggaatcggagacatttagaaaagagtggtgtaaagccagggatcattttcagccaaaaccgtggaaatccgggaagacttttaaagaggtcaaggagggtatcacacaggaggattacgtgacaagaacatattttatgggccctcagtggggaggccatttgtggttgatctgtttctagataacgtgaaacatggcagagggtaatcacatcatctgttcaccatatttttattctgaagaaagtctcccataataaaagacagagtgaagtcctattactttgtccatttatttgactctaagccctgacattgttaaatttccagagtttcagataccaagtgtatttagcttatagttggttcttcagtgcctagtacaatacgtgccattcactcattcattcattcatgtaacaggatacttggaggcctgccccatgccaagcactgtggctccactggaggttgtaacccattttgttattggtagagggtctcaactgcaagttatccaggttcttggtgttttgatcaaagaattggacaaaacgctcagaaaagtgaggaaaagaacgaaggaatgaaagctgagatttattgaaaatgaaagtatactttacagggtgggagcggcaggggctcaagggctcctgttatagaatctcatgggatccacatgccccctagaggtttcttattggccacttggtgttcacgccatgtaaatgaagtagtggcccacaatcagaggctgaactgaagttacaaagctgcactcctatgcaaacgtctgattgggtggggaaaagcaactaatcagagatactttcaattttccatctgctatgcagaaaacttgggatgggggtgggtttgcaaagggagtagcttctggtcctcttgttacttaggcccggaacgttggggtttttcttttgattttgttctaggaagtcagtgtgaatcagccttaggttccctgcccccagaccctattctcctgcctcaacttggtccctgctactatcctgagacccatcttagttggcctgtcaggtgagaaactagtgaacacatcaatagatagtactgacctactgtagccttgaaggagtgaaggatctcagatagataacagcagcaggattgattttaggcaatggtgaggggaaggtctcccagtcatgtgatgagtcagggaaagaattccaggcagagggaccaacaagtatcaggaccacgtggtgggaaaagcacatggtttgttctagcatctgagtgcagaccctggaagcaaagcaaagtgagagagagaggaatagtgtgacaatgaggtctgagagggagggaaggaggaaggaaggagctggatcctgcagagtcatgtaggatgcattaaagacaataaaatcctaaggatgatgaaaaataatcatttcaggaggatttacacacacacagacacacacacacgttctaagggagggaagtttgcaaaattttagtttacctttgaagttactgaacacttctcatggtcagtcatgttgctcttttgagatacctcattttggccatagattaaaatgcattaagaagctgcacagagttgtacattctcctgagagtgcttgaagctgagcaaactggggaaacatcagatgaatcctcggggaggaaaaagtggaagatataatgctatacaagtaggttttgactcccaagtctaattttaagagtaagcccccctatgagtggcagtaattggctggaagagtgtgattgcttctaattgccttcctaatgacacgtggcagtgttgggagctgcaggcttggtgcctggcactgtacatcacagatgacttgaccccggggagatagggctaaaatatctccctaaggtgagcctttttttgcagtcctccagtcagtgaagatggagggatgtaggttatgtgaatggtcctttaggcattttaggtaggcatgttccacctcagagggtagatatcctaccaaacctttcagctttaggaagattagcttcttaaattttcatattttagctcttgtttagtaatcagtggagtattccaagaagtttatgttgcatagatgctgttaatatcccacccacattttcttattttcaagcacttatatttttattttttgcatgctgacctgctgtcctcctgctggcacttgcaactctttccccaagggctctatggggccacagatgacatgttgccatccagaagggctgggggaatccatgtccgatagcgagcagctctgaggcgataattgatcagagttagatattaccttcccttatcttgttccctactcctctattgtttcctgggtcacctcccaaagaaagtattggtacctcaatctttgtcttgggacctgtttcctgggaaagccagactaagacacactaccttaagaaaagttgatgtaagaagttaatggccaaaaagcttcattgccagacgtggaagtcacatatgaaacccaaatgtgtttctctgaataagacaaagtcagcgttactatataaagtttaatcaagtgatgacaagttacttgaaattagtcatttaatcagcagctctgggtaatgacaatcagactttgttttgttgtttcatgggagggatcactttttgaagctggaaaataccagaaacttgagtggggggcaggcagccacttaggcccccaggaagaaattacaagaatgcttaatgaagcattatgagtttcctgcttgtgactaaatcacaggaaaactggatttgtctctgatttgggctgtatttagtctgtgaatattgtatttgttcacccagtgtttttaacatccttggattcgttcccaatatttaaaaattggggattttaatttaaaaggtcagtattaatatcttccttaaatcacagtgcacacattctgaattgaaacagtaaagtcaggcagttgggcaacagggagcctgcattcttccctgacagcagtgtctcttcctagtcagtccctactgatgagtgatattgtgaacttagccatttatatgatctgccacaccccatgagacagttgtatttgcatccatgatctaagaatttgttttcagttcattaaccatttgaaaaacttaattcttaggcactcctgccaatgagctttaaataggaagataaaatgtccatgaaattaaaatgtgtgcctatgtccatattctttgcttttgagggcgatgtacttgatggcgtgatattataagttaatgggattttgctaacaaaaacatgattagcttagagctctcctacaacaggcctccagagggaatggggaggaattttggtaattatgtagctcttagagtatttgacttgggtctctttagttatcttagctaatttcacatgacttgagagtatctgccaaaaattgaggcaacacatggatatattaaaaggagttggataggatagcctcagtgatggcctctgtaggaggaaagatgccttggggctgaatctattgggaaatttaatattgattcccatctttccacctgcattaaaaaagttcataaacctttaggagtagaagagccaatgaaatagaatttgccgagtgtttcacataaaataggtttagttgtgtgtgcttttcagataaaacgttgagggatgactaggtatatgagcatttagtctgtttttctagatataaaagagaaaaaacataatttaagtttgacaactgtcctttgattattatttataatttaatatattttttgaaactaatgaggaatactctgttttgtgtggatcagtgaatttgggatacatatcatcacttcctacatcctgacctctccactgaataaaaatttgagaatgcttaatctatcatgagtttcctacatgaggcaaaatcacaggcaaaccagatttgtctctgattctctgatttggtcaacaaatattttgcttttatcagtatgataatactattcagctctgaatgtagacagttgatttttcaattgaattattatgagatgttgattactaaattaacagaatttattaatttctcttttttttgagatagggtcttactctcttatgtaggctggagtgcagtggcgagatcatagctcactgtagcctcagcctcccaggctcgagcgatcctcctgcctcagcctcccaagtagctgggaccccaggcatgcaccaccatgcccagttttttttttttttttttatggtagagatgggatactactatgtttcccagggtggtcttgaactcctgggctcaagcaattctctttcctcaacctcccaccgatcttttgttaataaacatgatttaaatctgtcatagcttcagctcagcaggacatgaccattgcaacctcattgaatgggtataatccccagatctaagtggagatactttgtgggttgttattttgtgcagctactttaaaatattgggaaacaccactgttgagctccactgtgactttgagacctttaaggccaaggggcaaggtactttatatttccatcttcctttggcttgcattaaacttgcttaaagatgagcttactctagtgtagttatctcttctactgtctcctcaatgtcagatgttgtttattttccaaggtatcacttggctaatttgacaaaccaatcagtgctaatttaataatagatgaagacaatgctttattcatcaatttagtcgtgtgttaaatcggtcagtaaattgagtgtgaaccatcagccaggctgatgaaccctgccttcacaaaacttggtatgaaagacagacattggacatataatttcactaatctttgattttaaaatgtcatgtgtataaagacgtctggtgtacagctaaacaaaagtgctaggtgagccagaaactgtgaagttttaaggacaagagtaattgattttgttaattgaggcagagtgctctgatgaaacaagggctgaaagagaaaactgaagacgaatgtttaacctagttgacctggcgcattttagaacccttcgttttaagctgaaggttatgatatgctctttcattcatggtaataattgcttgagtctggatgagtatcgtgttttgttttgttttgttttgttttttaaatagagctagggtctcattctgttgcccaggttggagtgcagtggtacagtcatagcttactgaagcctcaaactcctgggctcaagtgatcctcctgccttagcctcctaagtaattgggactacaggtgtgtacaaccatacctggctaattaaaacaaattttttttaagagatggggactcactatgttgtccaggctggtctaaaactccttgcctcaagcaatcctcctgcctcagcctcctaaaatactgggattacaggcatgagccagcacacccagctcagtttggttgagtattccatttgtaattcactttttaaaatatatttcaacatggcaagaccctgtctccactaaaaataaaaattagttggacatggtagcatgtgcctatagtcctagctaattgggaggctgcggtgggaggattgcttgagcccaggaggttgaggcagcaatgagctgtgtttgcaccactgcactccaacctgggtgacagagtgagacccgtgtcaaaagaaaaaagtgtatttattgattatctgcttcatgccaagcattcctaggaactaaaatacttaaagagtgttcattgtatttagggttgagtagatatagatgccagttcacacagtatcaccatgtgataactacaataatgcagaaatgcattggttgctataggaaccagctataatgtgtcctagggtgtggcttggtggacagggaagatgtctgtgtgtctgggtgatatgtgtgctgtggttgaggagggttgagatggtgtgtgctgcgggttgagattgacgttgagttggggtgggagtggggagctggcagcagcatgtttggtgcagtagagaaagtatgaacaaggggtggaagccaggactagcatagctcatgctgggtggagggccacagtgaggtcctaagccctggaaggaatgtgaaggcaggcactggagacagatgaacttgggttgcatatcggggccttgtcgtggagagccttcatgccaagttttggactctaaagtggagacatgacagggatctgtgcagtgattgactgagttaattggaggtgctagctggatgtactgttggaaaagttcatctggccattgggcatttgaacctgagcatgggatggggtcagaggtttgggattagcttagatgactgaaggaaaattatagagcaatatcccctgagaaacaccaatattaaagaagctgaaaaaccaagaggaacctgcatagagaaggctaggaatggtgaaaactacactgtggacctaagagcagtgggtgagccagaaactgctgcagaatttggaaggaggtgaataattggtgatgtcagcggggccacactcacaggagcctgccatcctattcccagcagctgatctgaagggcaaggctacatgctgagtggcagtggggttgggggacggggttaggtgatgttggattgagcgagaagcagccgtcatttaactaatgattttcccttccttcatttttttcagatacttatttcttaatgcacaccataatatgtaaatatttttgattctataaagacatagttttaacctaattgggtgggggagagagtttgtgtgagtgagtcaaatgaatcatagagtttattcctggaatgagtacggactgtggttgaggatgttgagggtaagttagcagctgacatctgtgtttcactttaagcttccacaagacttaagccagatctagttagctgatcatctgcatagttgttctttaagttgggtatgcataacgctggtagattaggagcttgataatttcattaagtgatcatgatctatttcttctgcctttccatttttacatgtagaagcaaatatcgttaccaaccaaaatgacccatttgctctcattatgaattacaattcttttaaagaatttagtatgcatatccttgaccttttttgaaattaaaaattatcttgaaaatttacctctccgtctgtaatttctgtggtgtgctcaagaacagcttaatagtctgaaaacggatgaatttaaaattagagagttgaaggtcgtaacccagcagtgataactcagctaatgaaatattcatttccaagtacgaagtggcactgtatatcaatatgttgtcactgtctgtcatcattacgtagagcacaggtatatttatgcatttataaatagctaagggaaaaaagaggctaattacatgcagaaatgctacagaaatttccgtggctgtgcttctaacaggcaactgctaaccatttttccaagccacgtttgtgaattaagtataggttctgcacattaacctctgccgtatttggtttttagaatgatgctcttagggggaggacaattcaggagatatacatactttttaaggtcatgtccacactagggatttgtttatacaaatgtaaaatgaaacgtgcaatttagcacctatctagaaaaattaaaccgaaaactgtttggtttgaaaaatctagaacattgtagaagagagatatatttatataattagcatcaccaattaagaatgaattgactttagcaaaaatcaatgtaattatctagataattcaggctaattaaagaccttcccaaatccttagatcttcattagctgcatgcttctggtaaaagcagatttttggggtgtcacattagctttatattttgcatcagtcttgctctattctgctgccgtagacctggcttcaaatgatagtgcccacttgataaacagatgttgttcaggagaaaataaaataggaaatataaaatattctgtgtcgaattgaaagcatgagggtcctcatgttcttagaatcttcttagaaatacagtataaaatctttatatacagatacacattgacaacaatagagaactcataagcagttacctgagcagggttgaacatataggtagggtcatgatgataatacactaatgaacagcctgccttacacacatgcctccaatacacagacacatacacacttagcttagggaagtagggccacttctctcctgtttgttcttttccttggattcctatacttccctgggcctgtcagtaaccatcccttctccccagtcacactttttctgtagtcccctctctaaacaggaagcgacaactactaattagacttataaataaaagccaccttaaatgaacatcatgtgtaggtttcccaagttatacgtgcctctggcctttttctcatcatttactatggaaataaagacaaacaaacatattttcccccataatctttggagggtagagtaggtagtgtcagatgtgcctgttatggtggttgttcagaaattaaaagagggcaatttgcattggccaatggacactttagcttctaaaaaattcattttattcttcttctttgattattcctagcttttaatctgagtaaaggacatagattgtggcttggccttacttcatggcatgggaagcacatgatacgaataaacttgacttagtactgtatttggccgtggcttgacttgataccttgagcctcatgagttatttcatcagttggtcgctagttatggttctttatctttcaagggccttaacaaaaatttttaaagagccaggctggttatcgtaactattataggaattcaagggtggttggagagtcaacgtagcgaagagttagaaaagaggaaagaaatccacccccagactgggtatgtatcattgatagtgtcagaaacaggcaggagtattatttttggagaaaagacctacttttacctttgtgcttctatttttatacttatgtctcatgatgtttttaagacgccagaaatgacatatgtctatcaagttttgaaactaatatgtctttaaatgatcattctctgattacatcatgtagatttagaatatgctaaatttgaggaaaattagcattgtgtctttgaaatgtcccactggaaatagaagccttacgcaccataactgcttaaagacaaagagaaaatagatgtcttttgaattctttcttaattatcaccatgatctcccatgtgtcaatgctagtttttctaagcaaaacacagttttggtttttaacatatatcctgaaaggggaaatagttggtgatctggtatccttctttaaaagctcctcataacgtaggctaaaagaatcgcttatattttccccaaagctgaatcctttgtgtgccaaaaaaaaaagttatttaacctaagaagcaaatattaatatttcgttgagttgaaagatgtgtctgttcttctctccgtcctaaccccaaataaagtgattgataaagaaggaattatggtgatgaataattcctgatggccttttaatgttcgtttgtatttcctgtaaatgattaaggataattactctggaaagaatccggaaacaagagaaactccatagcaggaattatttaatttatgctgttacttcctttcctgccttttccctgaatgaatctaaggcaactttggtagcatcacattgcctctgtttgaaaaactttgctatgcttagttttagtggatgggttatctcattggcatctgaaatggtaaatattccgagtggtatcattagtttcgcttttcagtgatctgtgaagtaaagagcccctaagtaatgcgggacagtacagttactgaatcaccatagtccgctttattaggtccttctgggaagcccataaatgcttgatcactgaccccagaccttaatgttcattccttattggaagcctttaattttggtatgatggacacaattatatcacagtggttcctgtggagttgttaaagtcaatctgttcttaaaaacttcttaaaaggccgatttattgacttgatgggctgtaaaacagtttccgtttattacgggaattaccttcttaggtagacatttgtgaacatgacggctttagtgatacccctcgttacccagtggagtcctgttaaaattcctgaaattaggccatttattccctcaaggatatcgtctccagtggtgtctttttttcttgaagatggctcccgctatctcagacaaacttgtgagtttgtctgaggaaaataaaggatttgtagcagtattcaaaatgttcccagtttgacagtagctcccagttagagaggctcctgctgcttgtgtctacctgtcctcaaaggacacacggccaacttctttccttttcccagtttaaaagtgatttactcccatggttgagactggttttcagcatcaacgtgtgctgcatggcgtcttctaagtatcaaagcagagattcacttttcatttctgggtatttggaagatgatcaggtgcctaggactattagatgtataataaatatgtttcacttctcaaccagagtacacagggttacagagggaactaattttattgagttatcaaaatattaaaatttgtgattggcaatgcgtgaacattttattaacacattacaagatctactagcacgtataacaactatcataatattaaagttgtcatgaatgcctgtgacattttgagatacctgcagcaactgtaatgtgagtgatttctcacaatgacaaattctcaaatattgctaatagtactgtggattttcctacattggtaaattgaaggaattgctaaatgctgaattcagcaaccagtttgagattgttgaaaataaagattgtttctttttcaatgcaagttcacagatcactggagttctagctacagtttgttctagaccagaggttgcagatatttttgtcctataaagagacacatggttaatatttttggctttgtgagttgtatagttttcgttgtagctgttcagctctgctacatgaaagcaaccatagaccataccttaacaagtggtcacttttgagtaccaataaaactttatttagaaataacagagggctggatttggtcctagtttgctgaacccttttctagatgaaggctcctcttgccaagactggctccctaccttggctgacaaattctcactttgggacttagtcattgttgctgctctctgttattttgcatgtcttttctcatgtttaggtgctgtgtcttaatacttttttcttacatttaatttaacaatcattactgagcgctggtatgtctagtttcttttctcttctttcctccttttcttttctttttttctttttctttatttgaaggctctcactctgtcacccacactggaatgcagtagcaggatctcagctcactgtagccttgatgtctcgggctcaggtgatcctcccatctcaacctcttgagtagcaggaacaatgagtgcatgccacaatgcctggctcattttttaaaattttttgtagagacggggtctccctgtgttgcccaggctggtctcagactcttggtcctgatctcaagtgatcctccagcctcagcctctcaaagtgttaggattacaggcatgagctactgtgcctagcctctagtttcttataatacagagatgattaagacatacttcttgcccttacagaaattcatactagttgaatagaccaacacacagatgggtaagtgtaaatatagtgttataattgctacagtagtgcagcataaagtgttgctggaacaatgaggacaaaaataacgtattcctccctcatgggacttttcagtactttgcattcagtactttatatggatagtgttcctttctttccatgacctgatatatctaaagatcaatgtgtctgtatttaagtaagtattttatttgaaaaggatgaagagttctgaaaccctaagtgtttgtatatggtaatggaagtttattcacaggtaatgataacttactgctttggaggtactttgtttcacgagttgattgttatttgaggcttctgttgtaagtgaggtgagataaaaaataatgcctaaaacctagtcctctaatctggggacagtaaattttgtgcatggagtgaatttccataactggcatatcctgtcctggttgagatcttgtgcatcacatgatttagtgcttcattttcagcagctgtttcctggtaccatcagggtcggcatggccgtgggattcagctgatgtgcttattccagtgggtggtttctccctgtgttgcagagttcacaggctgtacctagctcagtggagtagactggtgtgatcacttagccgtgtctgtcatgggcagtggagtacagagggtggttgccctctctccatttcacacttgtactggaggaaccctgaggctagatggtttttctgttaatttagaaaatctttgtcccctaatgttgctggacttgctggggtggtgaaccattcgagttgttgccttctcttctccgtctgtcccttccttaagcacagagtacttcgggaacaccatcttgtcttcatcactatcttgggcatctatttattacaaacttggaattgaacaaaaatgttttagtccagtggtttggattaaaatcaaagttcataacaaaactcagaccatgttctattttactgaaaacatcaatagtgagtgtactagagcttttggagttagaaaaagaaccatggaaagcagagttgctgctgatgtgttttgcttcttggctaagtttgtgtataagtttatagatgtatactttccctatgtatacacatgaggaagtactaaagcagaactttatagctatttactttacccttggtttcacaaatagcttcactgaaacattacaagagaaattctcagtctcagaatccctttcatttcagaaattctttgacttctgtgatttttttttttttttggtttggtaatttttcctgaaattcagttattcactttgtgatttaattatttcatctaggaaaatatgtcgaataagtcattcatctctgacataggtaggtacaaggattgatttgttgatacttttttgaatatcaataagattaaagtatatataaaatctgagtttttgatctgttgtatgttagcaaggatatttgtaattaaaatgaattatcagtcagcacctcctttttccttttactgtggttaaggtaaagatgtcggttaacagtttaaaacaatagtctaatcaatggttgccgtgttgctaaattattaatgaaacagggaagaagtatggtataatttttattatttgacttgacttctgcacctgtttttatgtataattgatcctaagctattagagctgaagctttgagaatagttttgagaagcaagaaactgtcctttcttagtgggctggaaaaacaaagtcagcatttatctcaggtatttacaatgtattgtttcttagatttgtcatttaggcttactcccacagagtctgggaaataagtttctgttgcaacggtttcttgaggcatgctgttccagcctttgagtcaaacttaccaagtgactttaggaaccaaaatgattcttttacttagataacctgtttgaggcaagagttgggtacgtatttgtaactgtttcagatgctgtatttctaataaatttatttacttactttttttgagagggagtcttgctctgttgcccaggctggagtgcagtggtgctatctcgggtaactgcaacctctgcctcccaggttcaagcgattctcctgcctcagcctcctgagtagctggaattacagacatgtgccaccacgcctggctaatgtttatattttcagtagagatggggtttcaccatgttggccaggctggtctcaaactcctgacctcaggtgatccgcccatctcggcttcccagagtgctgggattacaggcataagccatcaggcccggcctgtttctaataaacttataatatttattcaatgacatctataaactacaagtgtctgtgctagttcggatgttgtttaaggtcctttcttgccttcagaggtatcgtttattagtgaatttatttttatctcactttttagattttgttaatgatgtgcagagttttaagagaaatggaaggcagaaaagtacatgtttaatgcatcttcctgtagaatctttagttctagacactggaatgcctcacttgttagagctcccctttttgcttgggttgctgtgacctcagagtgtaggagtttttaggggagcacggaagatgagagatctgtaatcttgtagttggtgtagtgtcaccaaaggggactctggcaggcacatgactttatgtctttacttctttcttgaggcggggagttgggggtgggggaaggaccagttcttattctgtcacccaggctgagtgcagtggtgccatcacaactcactgcagccttgacctcctgggcttaagtgatcctcccacctcagctccacaggcacccacccccgtcacccctccgtagctgggactgcaggtgtgcgccaccatgcccagctaatatttttaagttttttgtagagatagggactcactatgttgtccaggctggtgtcaaaactcctgggctcaagcagttttccctccttggcctcctaaatggctttacttctccgttgagcctacacttagtgggcccacgttgggctatgccacattcttctcagttcttggcccattccaccaatgaattcaggaatttgggttcatatctcaggtgtgctatgtcacatttttcttagttctgtttcccatggaaaacataacttttttgtgggttttctttctttctttctttctttctttctttctttctttctttctttctttctttctttctttctttctttctttctttgagatggagtctcgctcgattgccaggctggagtgcagtggcgtgatctcggctcactgcaacctccgcctcctgggttcaagcgattcccttgcctcagcctcccaagtaactaggactacaggcacgtgccaccacgcctggctaactttttgtatttcagtggagttggggtttcaccatgttggccaggatgatcttgatctcctgtcctcatgatctggccacttcggccttccaaagtgctgggattacaggcatgagcctgtaaatagaaaggctttgagagtggcacaagaaatataagataggaaatataaacaagtggaggaaaggtctccaaggttcagtgaatgattgtgaatattggatgcatgtcaggatttgtctctttattggtccagcctgtcgcttcctgtctgtccctgcttctcacagttctactatggctgtctgtcaccgtgaccagaatgggagtggaccacttacccagcccagtctctttcacttgaatggatatgtcacctgggcttgtggtgtacctagccaaagtggtggtttcaagactggttatgtgtctcaaagcaaggctaatgagcatcttttctgagtttgctagtcccctcccaaacagaatttatcttcttttggatgtgtttctcatccaaagaagaatatgctgcatttttggctttgtgatggcaacttcctggcctagaaggtagaaagagaaccagagctatgatgatacctgaaccagctgtatctggagctttgtaccttaaactttttaattatttgagtcaattccttattttatttatttgacttacatttatgttcttttctatcaaaaaataagcaatacaatggggaaagggacacaaaaagctattgataaaaaaataataataacaagctattcttaccagccaagaccttaacttgcaaattggcagaagtccagtccagtacagctttctggatgctgtctacttgttgttgttttttttctggccactgtctccaccccttgccagtttccttgagctaaaaggaccaaagttaattccaagtttggctaggtggtgaaaatgacactgtgagaatcatctgttctctgtttctccctgccatacagaaataaacatctttttgattattaaattagaactagcctgaagttcttccatggcatgttgaagttgtttccaccaaacaccttgttggagcaaagtgattttgctgtagaggaagtgacatccctggaagttaatgtcacagattttggagtatctgcttagtgttggagaaaggcgaacttttctgtttcgtttgcccaactgccttgacttgagcacagaaggccattttgcatgaatgcttttatctaaattctgtctttcccattactttccttgttttccacccccatctccattttactttaaaaaaaaatcagaatagaatttgtataattattatggacttgtgtgtggggggtatctttttcttaaggatgtgttagaattactattatttaaaaaattcttcttgtctttatttttctattgccatctgttcatttaaatattctcagattgtttatggttttggttttccctccatatattttctggcatttggctctccttttctgacacaataggtcaggctttcaaaaatctggtccctatgtaatttgactttttcagtagtcaacataccgcccatgccttccgaagtctttcatctcttaggtctttgagcagatgttaactgtttaaatattttgttgttttggtgtaaagaaaattgaaatataagacgtcagtgatagcatgctttgcttacaccagagcagattgctgcttacaagttgaatatgcaaacatctttaaaacatggaacattcccttatgcattttaaccataatctacaggttgtgtattctgaaaaatgagtaaattcatcaggttataatgaagattttcgtttgaaagctggtgtttttattccctgaattggtcttcaactttgggaacttacctgtggatagagtcggtctcccacctgagaatgagaaaggaatttaggtgtgttttatactctataacttctggttcatattatattgatgatggtatttggacttatttagtcataatatgagtggttaaaataaatgaatactaagttggtggtggtgtagagtcaactaggaaagtgacctcactgttactagtagtagcaacagaagcagcagtatcaatgatcagcgttcattgcatacttaatatattcctgacacagtgtcaagtgtctcatttaatcctcctgccagccttatctgttaatcccttttagtatcccattttacagatgagggaactgaggcttagaataagtagcttttctaaggtcatacaactaataagtagtggggctgggatttcagtcatggtgatctgagtctattgctcatgtgcttgaccactgtattgcatttcttcattgtggtatagggcttaagagcacaggctggtgaaggtcaagaagtagtaacctcactaaatcttacttttttaatctgtaaaaagtaggcgggaataggccgggcatgatggctcacacctataatcccagcactttgggaggctgaggcgggcggatcatctgaggtcagttcaagaccagcctgacaaacatggtgaaaccccatctctactaaaaatacaaaaattagccgggcatggtggtaggtacctgtaatcccagctattgaggaggccgagacaggagaatcacttgaatctgggaagcagaggttgcagtgagccgagatcgtgccactgcactccagcctgggtgacagagcaagactccgtctcaaaaaaaaaaaaaaaaaaaaaaaaaaaagtgggaatagtatctaccttcacagtgttgagagattaaatgagaaaatatagatgcctggttggcataagtgcttagtatataccggctatttttattatttttaaggctattgattactagtactttagaactttgtatatactgtgtctccccacccccattacaaagtggcctttgcatagtaaaagttcgtatggctttgagtgtaatcatatctttgggtggatagtgcatcactacctttgccttacatgatatattaaataattgaacagcagcagatacctctttaactttattcagattttgtccttggcctgttccccaccagccaaagcagggagaaatttgtagctcaggccctcaagttgaaagtgggcattaatattagcaaattccctttaataatcatcccattaaatttgatgaccagaggggacgtcctcatagcttataacagaaaatagtgtctctaggagtcaagggagcttttcccaaatgttatctattgagcaagattaaagagacagatcacccaggaggctgatggtaggtggtgttaatccattagtccacacgcagataactcgttaggtttcctgagcatcccccttaatcttggctgcagagatagaaaaggagattgtagaaacttgccctgcagcaaagattattgatatgttttcctcttacatgactcaaaaccaaaaaggaatgtaataaataacggctgtgactcctggagtgattaaagagcactcaggagccaggagagctgatagctgccagctccagagcctgagtgggcagaacttggttccttgagacagcagctgcctaggaaggacaaagtctgcatgacgctctgtggtgctttgtgtgcaagttgaccattgtggcaaggtcataggatagcatggtggggagggggttgcccctttgtgtttgttgcccgcacctttgcccttgtgtgcaggattctctctgcttccttttgtggatgaatccttctgactttttaggtcatagattttgtgttgattcttaagtgtggcctctacagaggtcgtttgccccttaatatgtttatattgttgctgttaactttattgtttttgtctgtcttaccagacacaaggcaagattttgtttctctcttcactctcttttctggcttaacccaagacctggtggtggcacatactaaccactccaaaatttttagaggctgaatgccagctgttggcttaatccatatgttttcatgaaaccattgtgttcatctgttttctcccgggtgaagggttagttgttggattcagctttatatatttggaaataagaaatcaagtgagggactgtaggaaaacgtagagcagctcctggttttgcgaggttgttagaggccagccggcacagaaatgttcgtattcttcccaggagctaagatattcatcatgagctctttgagccaggtttccatcatctgtgaaatacagaaatgatgcttactgtgttctagctccccttaaggattaaaccatttaacagatctcactgatgcagaaatttcttcttcacattttaatatctctgaaatcggaatatacttttcattgaataatgtttgaaaattgttggatttttttcccccatatttgaacatcactgagattgggctgagtcttaaaatcattggtgtctgacttcatgaaataaggtaattatgggagccgcattggtcttaggtgtatactaaatgttagtaacctttttccgtaataactaagaaaaaaatgttgatacaaacatcactatgtgaaaggaaggctcacaggtgtgagaagaacagggaggctgggttctttcaggtttggtgttgtcactagcctggagtcatttatctccacacccccccccacccccccacctcccgccttcctttgtaaatcaagatttttggtttttcaggtatgaaactaggttttccatctagtgccactgattaccagtagctcatgagagctctgtgcttgagtagagttgtaaagccaagtcctgagtttgtatgctggtgttagatcatgctgactgcccggagtgtggtgtggagaaggagacttgacagtgccctcagtttcccctcctgggttacctgatcctcaactctaatttttaatgtcaaaaagaaggaaagatgaaggagggacgaaaagagtgggagagaaggagaaaaaaatgaaaaaaacaagaaggatgaggatgaaatttttaaaaaaccaggtcaatggactattcttcccagcataaaattaaagaaggcagagagatacttgagtctgcctgctgaatccaagcatgtagtaatactgttgagacagttatggttgaataattttttcttcattcttaaaatgctcgtctgcattttaatacagacaattgcataaattatctcttataggaataaactctctttccacaaagattaaccctgcccagtatcatggggagcttttaaagagtttattagctgtgatataggaaataaacacttcagatgattgtggaaagaaaatagatacaactgtagctataaatgctaaaataccaactcagcatgttaggatcccttccccaacacacacttcaccactatgtaggttcccaccaaaatcccgtatgtgacagtaaatgacaactagttaattcttttggtaggttaagaagggcttttagggtatggacagtaatatcaggcatgaaattactttatcagtgtaatgtttatcagaatcacttgccaactcactatgcttcctctgagacttatatccaaaacatttccctgaaaggaataaaaattttttcacagtcactttgcattttaaagagtctgttctttaccacctcatcaggcattcaaagtgctgttgttgttgctgctggtttttttttttttttttttaaaccctttgagttattttgaatcttttcacttttacctttggaagggacccttagtgaaggtcttgtcttttcatctgtagcatcttccaataaaagttggctcaacaacagcccatctgataactcaagagtcggagacaagggcttgactagtgaatgaaatgttctgcttttgtggataagcagcaagtagaaaaggaaggtcagtggaacagaccagaggcatggtgagtctttggcctcctgttgatggggtagagctgtgcggtacagagccagccttccgttcctgagcagagttctcgtcattactagaacctgaaaccttgagggtttcttggtctttttcaccttctctccacctgttagggacataaacattaaaaatttttttttattttaaaatagtttttgatttatagaactctactattttcataatagtgttatgaaatactattatgataattgcatgaattatctcttacaggaataaactgtctttccaatagtagtatgaaattctattatgaaaataaagagttcccatataccccaaatccagttttttctattgttaaccatttacattaggttggtacatttatcaccagtaaagaaccaaaattaatacattttgattaaagttcatacttaatctgtgcagtacaaagccagccttcccttcctgagtagagttctcgtcattactagaaccagaaaccttggctattcagatggccttatttctacctaatgtcttttctgttccaagatcccatacaggatgccacattgcatctagtcatcatgtctctttaggttctgctggactgcgacagtttctcagactttccttgttcttaatgaccttggcaatgttgagtactggtcacatatttcatagaatgtccttcaatttggatttacctaaagttttcctcataattacatggggcttataggttttggggtagaagataacacaggtaaagtgccattttgatcacaacctatcaaaggtacttgttttcaacacaatttatgaccttgatctcctggactgagttggtatttgttagatttctccactgtaagtttgccccccaccatactgtactccttgtaacaaagtcactatgtgcagctcacactttaggaggtgggagttattcactaaccccttgagagtgtggacataacatttttccccagaacagtaagtgtatttattttattgttcaaggggttgaattctgaatttggaagatgctgtactatcacagttaagagtatggacactaaagccagactagggtgggtgtgaattccaaccctgctaacttcctagctgtgtacctggaaggtaatttaaactctctctgcctcactttcttcatctatcatatggatctaacaatggaaatagagtgaaaaataaagactctgtggtacaatgcttagaccagtgcctggaaaattgtaattactgaataaatattgtgtgactgtgtccatcagctcgttgtggggtgggagggtaggatggtgacagatatattactggttttaagctgatttggtatgttttttcatagagccagtgttctagaaggtggtaggttttccaggtgagttgaagacaggtgacatgttattacagctccaatttcaaaaataaagacagaaaacacaaaaaaaattctttgggtcaaaaataccctgagcactagtagaggataaagagtttttacttgaagtttagtaggtacaagaacttggagagtttcccaaggaggcttctcggtgccttggctgggttagagattgttgctagttcttgatggcgtccaagttacctccatgccagagacttccgtatgaggttggcacaatccctagtctgatttctcaggattagtgtttcaagttgggtgaagaaagtcatgtttcctgaggtaataggtgtggagaaagaagggtgttccgtggtggggacagaactgtgcacggtactctgtttttttttttttgttcttgttgcccaggctggagtgcagtggcatgatctcggcttactgcaacctctgcctcctgggttcaagtgattctcctgcctcagcctcccgagtagctgggattacaggcacccgccaccacgcccagctaatttttgtacttttagtagagatagggtttcgccatgtttgtcaggctggtctcgaactctggacctcaggtgatccacccgccgtcagcctcccaaagtgctgggattacagacgtgagccaccatgtccggccagaactctgcacagtacctttaaggaagaagaaaggtggaaggaagcagaaatctgctgaagctttgcagtgctctctggtgaagcccctgccctggcaccgcctgccgtagcttccctctgggaagtgacttcctggtaaggtaaaaagtgtgtcaccagctgcttctgcaaaacagatgcactggcagcccaggggagtgcttgtgaggtgggaaatggcttctgactgcttaatttagcttcaaaagcacacatattttcatgattaccccccagtggtctatgcacacagacgccctcaggtgctctccaggtacagaccactggggagggtggtgtgcgcacacgcatatgtgtgtgtgtaatttttttttttttttttgagacagtcttgctctgtcacccaggctggagagcagtggtgcgatcatggctcattgcagcctcaacctctagggctcaagtaatcctcccacttcagcccccaagtagctgggactacataaatataattttttttacacacatacatagaagaggggtggaggggggaagaaaggggaggagaagatgagggtgatgtctacagcaataacctatgtggagtgcaacaacagaaactcaagtcggcttgtgtcataatggaaaaaatggaaaagaataacgtctgtgttggcctcagtgagggttgggttccgcttctcaagacggttagggactgtttctctctgtttctgggctctgccatccatattgttagcattatcctaattctggctctgcattatggtgggctgttcactgtccacagcagggaatgtttggaagaactttctcagaaggcccagagggccggatgccaggagtttgagacccgcctggccaacatggtgaaactccggctctactaaaaatacacacacacaaaattagctggccgtggtggcgtgcgcctgtagtcccagctactcaggaggctgaggcaggagaatcacttgaacccgggatgtggaggttgcagtgagctgagattgcaccattgcactccagcctggccaacagagcaagactccatctcaaaaaaaaaaaaaaaagactcagtgtttcaggtcatgtcagttgcatcctaactagctccattatttgtgcagctggttatcttagcaccaagatacatgctgcaccctaccctacagtctgtttaggaccttaaatcaatttttaaaaatggaaattatcagtaatatacaaaagtaggaggagtaggagaatgagccctggtgtagtcattgccagtttgggtggaacttttaaaaatcaccagttcatgatttgaatagggaaggtgtgaccactgagacgagaaccagcattattttccagagatggcaaaatagagcttgagaagctggccaaagagaagatgaaatgaatgctggttgcacagtgttcagtatgtagacatcaagggattctggccctgttagatatgttagaggaaaggtttgtttaacattaatacaatgtgctacaggggaagtgttgtcaaacagttatgccggtttcttaggtaaagttggccagtattcttcttgcaggcctagtttgcttcatcattaggataactgtatgcattctcattggagcctattatccagatataattgttaattatgtccattctttcattctcaaaattgatttggtttggaccatttatcagtcctgggtagaaatgcacattttctgactttctgactgtctgtctctgtggagagcctctttgtatgacaccagctctgcagcaggagtgcttgtgcacatggccattatgagaaggccagttagatttcaggagtcatggggactgtgaggacctggaatacccatgcccagtataaaggtaattcaagttcagatctgtgcaaaacccacgctggatgcaaaaacacatttgctggccaaattcagatcacaggcacctggtaggttcatcttcttctttatagggaactgttaatgttctagaccctgggtaggcaaactagggcacacaggccaaattcagctgtctgatgaactaatattggaacatagccacattcatttgtttacatattatccatgggtgctttagcaccatagacagagccagagcctaaaatatttcctgtcaggcacttacagaaaatttgctgtgagtagaaatctgtgagccatcaatgccagtcacacatgtaatttaaaattttctagtggtcatactaaaaaagtaaaaagaaaaaggtgaaattaaattacatttagttgtttattttattcaacccattatctctgcaatagcatcatttcaacctgcaatcgataaaaaaaattattagtgaaatattttacattcttttttttcctgcgaagtctttgaaatctgatgtgtattatactctgtaagcccatcccatttcttactaagggacattgcaattgcttaattggccatatgtgcctggtagccattgttttggacaacatggttcatgttgtccatgttgtccaacatggacaacatgtaatgcctcaaacattctgctaagcacactgcaacccacagtactatttcaacttatgttcacgttttactgcatacttgatgagttattttttcccccaaaggatttttgttgttgttgttgcttcctgaatgttgcacttttacaataaaacaatgttgaaatgtgaatgtctggtggttggctgggctctctcactgggtgacacaccaccatatactagctttcaggtgctcaaaagtaatttcttcctcaagagattgaaaaatacctatttgtcatgggtcttctgggtctgttagaataattaccaagtatttggatagttaaaagttgcaacgctagggtcttttatacttgctctaggacatagttgtcaggtatgaaaaatttaccatggcaagatccatttgttgtattaatcactacctttcccttagagttgatttatggttcagagggatattctggaaaatgcttagatcaaacaagaccacattcattcatggagaaagagtggaatgcaggttcgtagtaaagaaaaataatttccagggctcctgggaaaaagctttggtcacttaaatgcccttgggctttctgtaagtaaacatctgcagtcctctctattggttttctagcatatttcacacaaaagcaggggagcagagtagtgttaattaccctgagccaagtcagtattaatctcaggtctccattgttgtttaagattgatggataaagatgtgactgcccagaactacctttgttctcttactggaaagatgtggacttggaggggcaatctggagttaatagtcagaactagattgtatcctccttactgggatgtgagctctgtcacctgagtaaccaatttctttgtaaagggatgtaatctcaaatcttagctttcaagctgccaggcttggtttgcttttatatccccaaatggaaccggaaccttctttattccaatggtacattgtggtagactgtattcggcaaccttttgtatgaaagggttaacatagatctgtctcatcagtgtctttctgtttaaggatagcataaaagtgctgattgttaacttcacttggtcctatgcttattctttatttttactgtaggatttactttttcttttcctgtgtctttctctctccaaaaaaaaaaaaaaaataaaatctaccttgatgtgtcaaagagataaagaagatgttataaacattaaacaaaagttcacgtttctgtttctttgtgcccccggtcccccttttaaaaataggcctcacagcatcaggcatttgccagtgcagcagttttgaagcataggatttttccccttcctgatgtataaatgccagctctcttcccccctttgcagacacaggcattttcctcttttgagttttagttttatgatagcacattacaaagagtttgacagatcctttaagatgaagatctgttgatgtacttcctgtttatggtggctcccagcttcactggtgatgaggacacaggcgcctgaaacccagaggcagggtggatctgcaccacttctctgaccttgccagggctgaccttcatcattctaagggaactttttttctttttttcccctccctaagcagtggttctcaatttggggctattttactccagaaggggcttttggcaatgtttggagacatttttggttgttacagcaagacttggagctaccagcctctagtgggtagaggccaaggatgctgctgaacattctacaatgcactggactgtccccacaaaagaatgttctgtcctgaattgttgatagtgccaaggttaagaaaccctcccataagggatgttttctaggcttaaacagtggcctgtatgtgtctttctccttatttctttatttcaagaaaagaaaaacgctgccaaagcaaaagccatgcagtatgttcataataaattaccttttaaaacaaatcccaggcctactcttcccgaaaatgggaaagacaaaaaaaaaaaaaaaaaaaaatcaaagtgccccatggcacaagttatccactgatgacatttccctctgaggactgttttctgggttagggtaattaccacaacccagaaggtcatggagtctaagttaaagggcgtcactgattcagctctcagatgagccaccccactgggatgtatgatggtataaactgcaattaaatcttgtgctgtatttactgtgtgattggaaggacagaagggagatttccctttagtcattcttacctagagcaaaactcatgtttttttagtgtaatgtgatttcttgagaatggtagatgttagtgaagtggggcagggagatggatttacaaatcttggagtttgcaaaatatgacttgaccttttgttcttatgttgtgggctgtgttttctattaagctctcgatcatattctctctttgccatttaagaaaaatacagcacaaacctctgtcagattttagtatatggtgacctaatttggtgggatgattgctaaagttctggaacaggccctttgtagctgatttttgttgaattgataagcatcgaatatactaaatataattttttgtgcctaggtctcttccaaaacttgcataccatttttagcctgaactcagtgttatcattttggtcttttaaagtggagggagggggagagggagaatccaattatagcaagcctgacttgattgaatgatcttagaatgaaccttgtgggaaataatgtgttggcgagaaagaaagttgagtttctaaagttacagaatctgtagatctgttacacaagtgcatgtaggtaaagcctccctggaatgattcaaaaggtagttgtaatggatgggttaaagacttcatttcaccatcatccttatccaggttctgaatacacatgccctgtcgggtctgtggctcattttagatacagtgagtggaaaattgaatttaatgattaagtctttttggtttctgatttgtggattttcttgtgatttttgtacttctggatttatattgcatcttagtgaatatcattttttttcttcttaaattatctaaaatatgtgatagggtagttagcaaacctgtgttggttatacctattggcaaatgaaaggagatgacagaaataggctccgatgggcccatggctgaattacagagtggtaattattctttaaatactgaaataagagttttgcctattagaagcctcataaaaccagtgtctacaatctatctgattttgctgttgatgtaattttaggaaatcaaatgaactgggatggaaattaggtttcatactccgtggcttgtgtacccctctaagttctattaaattttataggagttttacaggtggaaacacagcagcaccacagcttttgtcacttcaaagagcagccctttcataaacagagaatacagaatcatgccttttatcttgccatttaaaaattcttcattttctgcacccaagtgatttatcacatggacggagaggacaattcaggatattgtatttcgaaaaagggaaagagaagccattcaaattcctattaaaatgaattgcactagctgtacatcattttctaatttctgagacgacttgtaaatcacaaggagagagggcattctaccattggtcaggggaaaaatgggaaatttaatagtttgtcaaagattgataagaaaggattaccactctgagagaccctaacttgatgagcaagtacattttgaagttcatcagacgtataagcagttggagagtttaattaaagttacttgtcattactcaagtttacatccggtctgtctctgggccagcgtatatggtatgccagtgacattgtcagaacttagttttgaccctgagagctgtgcgttgttcttttactccctcttgattcctctttcatcatgtagaagctgatgtgtattttaacattgtggtcaatttggtgacagaggtcttgatcagtgcaagttccagtagttagctgaattttatatttttctttattttttagctgataatgattcaagttgttggaataatctaagactgctagaaaataacatatatacacatatgtacacttgtgtaaatgccatcttgataacagaatcataaatgtgttcatgtaagggtatgtgtgtgtacgtaaatatgtattattgaatcgtattgggatgatttttttttgccctttcagatgtcaaattgtatattgagactatttattccattcttataagcaaagcccttcctttccctcttgttcctgcaaagcagctcagagaatgacttttaactgggcaaccatatttttgatcttctgcagagctaggagcactctgacatatggttcaacaaaggctcgcagaccggggcatccagtacttgtggtgcttctgttaacgcctgtttatcagattattgaagggcaagctgctttcctcagaacgtgcttgctctccctgactctgtgtaatcctatccaggcacggagctgatattgttatacaaacaaaactcaataggcattactgaaatccagagagtggattctttaggattggaccttttgtgtgtgtaaccacatttgaaggagacctaagaatcatcatctggaactttttaaaattgcagttactggaaactaaagccagaaactaggagaaaaccctccgattttttgtttggttatttttaagtggagaagttacaaaggtgttagctgttaagatgtggagtgaactggaatccagtggctctcaaatcttgcagctcatcagaaacccctggtgaactttgtacgtggcactcacccctattccttaactgtgaaatctatacatttttttttcatccaccccagataaatcatatgtaggtgggctcttggtccagtttgggaacccgtaaaagaagttatcaacctcatcataaccttcccaggcaggaatcaatttctttgaatataagccattcaaattccataatatgatactggctctaaaggcacatttaattatgtaggacacaccatccctttcgcaaaatcgcacaaagatttcaacttaggcctaaaatctttggcacatacgttgcactgggcacggatcccttggcctagataatactgaattaaactcctccctttcctgccctcccacacagaatttggccagagaagctcagtgaaggttattcttaaacccatccccgttgttcaaatctggcagtaaaaaaggctttacaacttgggtcaactcctaatggggccttttgatccaagtgctttaaagtttagaccttttgtatctttgttgataaaaactgaggtgtagtataccattaaaatttttaaaaaattatttctactgaacctgttggatttaatctgtttttgctatctagtaggcttgtgaccttgagcagatgacttaactttgccacatttttttcttttcttgtaaaatgggggtaatataatccatagagttatcataagaataagtaaaagaatgtgtaaagtgttagttcactgccttccacatagtgaaggcccagtaactgttgtttcttattattatcacggtgggggaggttagtgggggaaagttacaaaatgaataagcagcagactttgccttagtcaagagcttgcatcctcaaatttggagtaaggtataattatattaccatactagaagtaggaaggattaaaagaagaaaataaagatgcactcttttttcagagaaaaatgtgatcactgatggctttttgctgcatcttgaggggagacattgcccatgaaacagttttctgagctgagcccagaagaataaccctaaaggagtgggacagatagaaaatccaactggaagaggaagtggtatggtgtactagtgtctgacacacagaagatacccaagaaataagggttgaaaaacatgaggctttatggagagaaacttacatttgagttctgatcctgttaatttctgtaaaataagtattataacactgaccacataggggccagtgtggacagtgaatactatatgtcatgtacctagcaggttatctggcacgttgtaagcttgaaaagaaaataatatagttattctgtattaatatgaaggggaatagaaagacataaacttgaaacataaatgtggaccagataattaaggcatttgaatcctgaactaaggagcttagattttattcacttgacagttgagagccacggaagctttttgagcgggtgcacagctattgaagctctgtgctctcttgatttcaaggtgattaagcagaacagttttcccccagctcctgtatcagggaggcagagctttcccagaagtcccattgcatacttcacctcaggtgtgttcttggaattgtggccatgcccaccttatagctgcaatggggggctgggaaactgtttagcctgttgagcctctgtagctggaagtgggctgtgcctgcacagcctaaatggcttttggtctgtggccaggaagccagtgatacttgcaactgtgagcataatagcatgttggaggccaaagtgtactctacagggagtgcaggataaaataagaacaatacgactggtacagagaatagaggaaagggtagaggtttgtatgaaagctggcaaattcagttctagaccaaaaatgagtttagggtgcaggtaggatatccaggaagaagtgatgcatgggcaggagtaatttaggattagagtgcaggactgaaagtattgatcagtgaatcattgatttggaagatgacagtaaaaccctaagaatctgaggtaaggaaggatgagagaggaatggacaagaaccagataacaagcttaaaggaatgatttctttttaggtgccctgtataagcaacgacagtgcgaagggataccttatttagcattgtttaaacctctttatctgctccataggcatatgacctcaataaaggcagcagtgtgtttatgatgcagacccagctagaagacaagttcccaggtctggctacccacccctactcttggccacccaactcctacctcttttggacagatttctcttctcagctctgtctgtgtaatgcaattgtccctacaatggcctttgacagagaagtcatggagatccaaagaaactaattagaatgaataggcattttttataagtaattcgggacaaatggagaatccagtccttaagaagggttgtaatgagggtagctgaatttgcttttgtgggcttttactttagcgttccaccatcaaggtgacatcatatgatgtaagaatgagtatctgattggctacctgccagccaatgagggttcccccttgcctacctgtgttggggagtgcaaggctgtcaccaggagggcaggttagggtgaatgtggcagcccaggtgaggtagacctgatgattgttcgaatgtgacactttctccctgtcatagcccagcagcccctttagtttgtgactctgctgtgcctcccaattaggcctgctgtggacatctcacttctggctgaactttgggctgggttttgtgatgctctttggtcagtggaatgtcatggaaggcccatgaatagagtgcttgaatgtgcttgcatgactttacttggcctctctgttctgctaggtaccatgagaaaagcatgtcctagattcacaggtggaacttcctggccccaacctgttgcttaactctcagtcacccagtgtacccaaacaccagtgagcaagaaataaatgcctactgttgttcaataccaaaatccttttttcccctcttgcttttggtcccacagtattgttgcagtagaaatctgaccaacacagcagacaagttgactaatatgtctgctctttggccagaaaaccaacaagagccagaatggacagtgatgatggaaatgaattagttgcatctagggccatgtaacttgccctccatttgaccaaagctgaatttcattgaagtgtccattccatcatgcctgagttctatattggaaaatgatctgctttttcacaaaacacaacttcagctttcatatcctgattaacaaagacaatatgcattattagacttaatttaaaggtgtaatcagccatgcgagtcagataagggaaaaaatagtaccatggaccttttccaaattcccacaggcttaaaatataaaaattccctcaagagtgctgacagcataccttgcctgttattacagcttgagttttattttgttcctctgccagtaccagaataaaattaggttacaaatcagatctaacggtttagattattgttcatcttgagctctgcgctttctctccatttgttgtggcatagcagaaataattaaatttattagtaggcctgtcttcaaaaaaaggcttttatttcaaaatgtgcttgaggacatagtggggagcaccatgagttaagccttagtttttcaggaggtagaactgctaggatataaacgtgtggttttgcaggatgaagagatgcttgtaccccaatataacgcattcttactgcaaataacaagttttctggcaacttcttcctggtatctacagttgattgtgtgtgtgtgtgtgtgtgaaaacgatgatttttagatttactgtcttgagggtagtttagcagtggtcctgaccattcattcattcattcattcattcattcattttgtcaatccatctgtgagccattcagcaaatatttattttccaccttcttttcaggatgtgatcaatttttcttttgtatgtaataatctttcacactttgaagatcattcaaaacgggtatgtacatttttgtggtgtaatgaaaacccaccagtttaagcccagatttgtcattaaacttcctaagtttccacatactgcctctatttgttccttttttgtaatagaggttgaagattatttgaaacagaaatggatgcctttgctcaccaaaagtcagattcatcctatctaggtttccagataactcctcgttagctgctttccacagtagagattcttaagggacaacaagaccagcaaaatgactcaagagtctttaagaagaatgtgtgccccgagggctcctcagatgttcaccctcagtctccctgcccatgttgggccagctctcagataattctctgatgcagttaagagtgtgggaagtgatagagggcattgcggcagagaaaaaccctgtgaacaactgtcttgctggtttgatgaatatttaatgtgctcctactggtttaggatgctaggttcatctaaatgtgcataactacttttagggtcttaaatgcccccttgctttctggagacaattaaaattttaaatcctgtaaacagttttgttacatgcaaagaatacttgtgtagatcacctgaaactgtttcccaccaattgttgtttgggaaagactgttgtatttgaaatactagaacaggtgagtgaggtagaacatagtacagattctctctagcatgaggttatgtggggctcaacggaatggtagagcatggggtctgaggctgtagaaagagtaaggtattttagaatgaaaatctttgtgggtatggctgggcacagtggctcacgcctgtaatatcagcactttgggaggcttaggcgagtggatcacctgaggtcaggagaccagcctggttaacacggttaaaccccatgattactaaaaaaaaaaaaaaaaaaatagaaaaaaaatagaaaaattagttgggtgtggtgacatgcacctgtaatcccagctgcttgggaggctgaggcaccgagaaccacttgaaccagggaggcagaggttgcgttgagctgagatcgtgccactgcactccagcctgggtgacagaatgagactccgtctcaaaaaaaaaaaaaagaaaaaagaaaatctgtgtgtgtgtgtgtgtgtgtgtgtgtgtgtgtgtgtgtgtgtgtgtgtttagttgtactggcttatttttcagccatgaagagttctagatgcctttaatagcagtagttgtagttgtagtcataataacttattgaatgtatactatgttcttggctcttccatggaacatcttgtttgatttattctaacaagcctatgatgaaggggctgttaatattctcatgtgacaaaagaagcaaggtctcgaagtggtttgtttatgttccaaacatttgtgtagtgctgtaatacatgcttttcacatattacattaattcttacagacatcttatgagatactggctttttttttttttttggggggggttggagtctcgctctgtcaccacccaggctggagtgcagtggcgcaatcttgtcttggctcactgcaaccttggtctcctgggttcaagcgattttcctgcctcagcctccagagtagctgggaccacaggcatgtgccacaaggcctgactaatttttgtatttttagtagagatggggtttcaccatgttagccaggctggtctcgaactcctgacctcaggcaatctgcccgcctcagcctcccaaagtgctgggattacaggcgtgagccacagcgcccagctgagatactatttttacagtgaagatattgatggggagaaagctaaggcgcctttctaaactcacatccctaacaagcgggtgagcaggatttgaaccagaccctctcgctctttcaccatcttactaaagagcttatagttcataaccactggagtattccacttctcgtatacaagaacagctggaaggacagactttgctagttttttatcagagagtaaatctgaaatccacctgcagacctatgtctagtggtaacttgctttgttgatatctgacttactgtagttcagcttctctctagtagccccgtatgttttctgcttgttttttgtttgtttatacttgaagatctgctctgaagattttctcagacctctggtaactgtgagttacatgggaggctgcttagaattcttaaatgtcagtagtagctacctagtgtgctgctgctttatttcatgcataagcaaaaggagaagtaacctgtataaaaacttgtgtgccatgataggatattgctcttgctttctatcttatctcacttttttcttctttgtattcatctaggatgactgggaggggctcagggaaataaatgtcgttgcatggctgctttgtgccaagcatattgttaagtgatttgcatacctggtatcatttacccctggcagcaactctatcaggaagctagcagtttttattgctatttcataaataaagatgctgaagcttagagtggccagtggtagagacaggatttaaactcatatctgcctagtgtcctatctagtacattttctcctctgcagggctgcctcagactcaggttttttgtgagctgcctgctaattaggtggttagtggctgctgctttctcatgtttagttttgtttattattaaaagaaatctggctgggcacagtgcttcacacctgtaactgcagcactttgggaggccgaggtgggtggatctcttgagctcaggagttcaagaccagcccgggcaacatggcgaaaccctgtctctactaaaaatacaaaaaaaaaaaaaaaaaatcagttgggcatggtgatgtgcacctgtaatcccagctacgtgggaggctgaggagggagaaccacttcagcctgggaggtggaggttgcagtgacctgactgtcacactccagactgggcaacagaacgagaccgtctcaaaaattaaaattaaaaataaaaataaaagaaatcttattgtttcattttactgtcttgattggctttaaccctgtttccaatgcagtcttagagatggaatacattataatggggataaccatgtctcagtgtcatctctcatttgatctaatcagagaatacgaggttatatattgacaagattgtagggacccagatgagggggctgcattgttttactgtgcaaaagtagtttatccgttttttattgtgagtgcttattgagaacctcattgctctgtgatcttaatcattactaagcaagttgaaagatacagtggctgtttattaggttaagggaagcccacacatctatccaataaatatctgtaaagcacctgttacatgctgtgcactgttacaggcactggggatataggaatgaatacagcagaacatgttcctcatttgccctaaaaacataaccagtgtttggaaattctagaatggacctctcattattttcatttttatttcattttaggctattttatttcctaaagtcactggtgactggccatctttaacccttgaaaatattactacaagtgaagatctcttgatagcaaaactgatgactttaggtcttccctgcctgctgttgaataactcttttaagtttgttatgaaatctgtaacatgacttcagtatcatctagtcaagctcctacatttacctggtgaggaaattgagatccagggatgaagttcaaatagcaaggcaactccattcaaagtaggaattgtgacatgctgttgttttgtgtcttggcattcttgaacagaatttcaaaaacccagaaaaaggctggacgtggtggctcacacccataatcccagcactttgggaagatgaggcgggcagatcacttgaggttaggagtttgagaccatcctggccaacatggcgaaactccatctctgctaaaaatacaaaaaaaattgctgggcatggtggtgggggcccgtaatcctagctacttgggaggctgaggcaggggaatcacttgaaccctggaggcggaggttgcagtgagccaggattgcgccactgcactccagcttgggtgacacagcgagactccctctcaaaaacaaacaaacaccaggaaaaatgttggaatgttaactctatcccatccagctatcagatggttgcagctttacttggcctagaattccttggacatcttctcccacagaaaaatcccaatggctacatgtattcaaattgtttatggagtttttgaaaatgaattgaggaggcacatggatggctgtttttgcagcggtcttgatgagatatgatgaaagtttggttgagtatgattgtgaaggagataatagagaagtgaccagatttgaagaccttggtgagataaaagtgatgtctcactgtgctgatgagaaaagtttcagttgaaaatttgtattgacatgtagctttttggtagggataatttactggtaaaatgaaatgaaatataatgctatgaagctttttggtagtacctgagagtttcagtaatcacttatatatatattatatatatattatataatataaatatatatactatataatatatagtatataatatataatattatatataatatataatacatatattatatataatatatattacatattattacatattacatattacatatgtattacacataatacatatattacatatatataatatataatatataataatatataatatataaaataatatatataataatataataatatatataaatatatatttatagagagctgttgggaatctccatcaaaagtaagtgctgaaccttttaaatcactgaaatttttttttaaatggttcaacaattttatagaaaacattggtagggggagatttttattttggggggagttggtaatttaatgtaccttttcatatttctaagaaaaataaaatatttagttgattgttgttggctttagaatcattatagttgagttttcaatgaattctgagaagaaaacaaccaataatggcagtttttaaatcccaaattcttccatggaaaaataaagcaactaggaaagctaaactataaactcacaaacaatatctgtaatgaaactaggttatgaggtatctccatcagtctcagaatatgtgtggatgggacaaaccacctacagctacgagacctgcgtggaattggccccagagggaagagacagaggacctgaagtctcaaatcagctgcatattgcagatgcccatgggaaagtgtgctgggcctacttgggatgtgcattgaagagtaggcatgcttccatagcatacctagttcctggatgagtgcaaggagactgcagtggagcaagatgtggtgattttggggctctatcattttccaaactaataacctgaatctgccttctaaggtaaaacttgcaagaggaagaactgctgggggtagaagtcagaatgaacaagatggggcggtgagagtcaagtatagacaaggttcagataacagtgtggaagttgagaagacaggtctgtgaaagcagaaggtcatagtgtttggaatcactttgtgaaaataacagtgggagatctacatgttaagaactagaaaagctccaccataccccccaccctaaccccatgattagcgtttgggaatatttattttacattaaaaaatgagcagaagaaaagcattacacttgaactctatataaagttattccaaaaaaaggaaatacggagcagcactcataaaagagttgaacactatatacctgatattttaaaataagactaaaatatgagaatgtgatagatggtatgaaagaacgttatacattagttttagagaaactcagaaatgccagaattgaagagaaagatggcaggatttgggaaagaagtagaaataaaataatgtctcagaaattaagaataaattagaaagaatgcaagagcaagtagaggaggagaagattttaataatcaaagagaaatataataatgaaaaagtcctataaaatgtataatgaaaaagttgtttaggtgggtgtggtgtctcatgcctgtaatcccagcactttgagaggctgaagtgggagcatcacttgagcctgggagtttgagatagcagtgagtcatgaacgtggcactgtactccagcctagacaatagagcaagaagaccctgtctccaaacagaaaaaagggagaaaagaaaaagttgtatagaggctgcctaaaggagaaccaaaatatgtgtgataggagtcctgtaagaagaaattgaaagtaaagagaaaaaaaatattaaaaatcacaagaaaaagtcattgaaataggggccctttaaagtgaaatagtgaaatagtgaatagtgaaatagtgaatagtgaaatagtgaatagtgaaatagtgaatagtgaaatagtgaaatagtggccctttaaagctatatttaaagggccactatgttccttactaaatcttctcaaatcatcccagataaataatatagagaaagtatgggtcattcatgaaaaggaaaaacaaaaatcctttgagcatcccagcaaaaagactctgtcactataaggaaaggaaaattggattcttgtgaaactttttttttctttgacagtagtgttatatgccaaaaagacaatggagtatcatatttaagatatgcaaggatagaaaatgtgaaccatgaattttataactctccaaaatggtcttcaactatgaagatcatatgattgtgagtgtgccagaaatcaggcaatataacttccatgagctgtttttgaaggaactagtggagaacaagcttcagataacctcaaagcttgaggaagcattgatgacataagtagaggtcggtaaatgattgctaattgttctttctctttacatctactaaggataccatgtagtgtttcagataatcataattggagtgtccagtgaatttggggaaggatagcactagaggtgacacagttttgtggccctgaataaatttgtgtatctaggcaataattatcaatggccactagcatcacaaatgggggagacacctagactttatataattctccataggagaatgcagtactacctataaggtagttctgccaacaaaatagggaactttagtctgatcaagcttctacatctatcaatttacagaaattaaactgagtatcatgttaaatggcaccatggggatgcaatcagcaaaacagacaaaatccataacatgggaatctttatacaacagagggtacaaaatgtttttagcacaaaaaggggtaaatggagataaaaggggaacctatagattaaatgagattaaggaataccttgatttatcttaatgtgtatggcccttatttggatcctgattgaagcaaacacgttgtaaaatggaaaacattataactagttgggaaaatgtatgtgaatattggatttttaggaacggatcattcatattttttaagtgtttcctgacattttggtttttattaataataaaaaagaatacattggagaaaaagggtttgagtcatcagtaagcgaacataggatgttgaatcactcatttgaaattttagtagatatgtgagttagggttcttcagaggagcagaaaaaaggagatatatttttaaaagacatttattataaggaattggtgtgactgtggaggctgagaagtcccacagtctgctgtctgtaagctagagacccaggagagccaatggtgtaaattcccatctctcttggaggcctgaagaaacttatggccctggttaagcttaaacactcaggcagagagaagatgttttcccttcctctgcctttttgttctattcaggcactcagggtgccctgaatgggtacctacccacattgaggtacccactcgtattaagtggtgcccacccattgaggaaggccatctgctttaaacagtctattgaatcctaaacaccctcgcagacccactaagagataatgtttaaccaagtatctgggcaccccatggcccagtcaagttgacacacagaaatacccatcatctcagaaaacactcccctttttaatttcttgttcctgtgtctctgttttttttttttttttttttttttttactgtggctttagggataaaacagtaattttggtgttgaatcacggtgttcattaaaatggagaaagcaggttttgctcttgggtagatagaggcgcctggctgctggggattgtttgagtaacagctagctatagcattcatcttcaggggttcctgttttgcacttcctctgtgaccgcagtgagaaattgtatatgagtgagacttcctagggttctttggccacactggagagcttgattacttgttacctctaacacctttattggacatggtgtttttttgattcactgtgaacatttatggattttttttcattacgccaagcatttcaaatattcctttccttatccaggatttttaaatgctgtgtttcttttggactttgtctacattttgcagtattctcctcagcatagatttctccttttaatggctacttcttcagctttatgagtttaactttttcaataataaaaacagcacaaaacatattaatcatattagttatgatcagttctcatttgtctgctcttcttgttttctttttttttttgagaccgagtctggctctgttgcccaggctggagtgcagtggcgtgatcttggctcactgcaagctccgccgcctgggttcatgcccttctcctgcctcagcctcccctgtagctgggactacaggcgcctgccacctcgcctggctacttttttgtatttttagtagagacggggttttaccgtgttagccaggatggtctctatctcctgacctcgtgatccacccgcctcggcctcccaaagtgttgggattacaggcgtgagccaccgcgcactgccgtctgctcttcttaagttgacagaaaaggagttttacagtttttacatttcttaatcctttatgggaaatagtatttctttcgttttgcatgccagagaactgaggcttaaatgataagtaatgtgctgtgacttataaagctaataaaggaaggctaggatgaccctaagcatagaagacagaggcaaaagaagaggggaaatatgaaagttaaagagatataaacagtagagggtaaggggtcgtgaggtgagtgtatgaatagcagtatgagcgatgacaatactgaatatgataatgattgagaacatccgcccaagatgcatgctaagcgctttactagtattatatcactggatttcacagcacctttatgtggtagtcacagttattttctccattttacagatgagtaaacagagctgttagaatattatgtaatgtgcactgggcaggctctgccaagtgcgtgcagaagcataagctagcaatttaactgcctctcaaatgcatcatagtaatctatcttcctccttcatcatcagggattaagtaactgcaccatggacaatgtaagtaacttgcctaagtaattagtttcagtcactggcacagccaagtggagaatctctcttttctgacctggaagtattatgagtttgctcagtgagtttgtttttggaaatgctcctctatggcaacattcttgcctattcaatactgtttctttgacttctgtgtctgtttttaattgttcagctcttctctttccacccacatccccaaatatgcagtgagtagccgttgggtttcacgttgtaattggaaaaggtaaaagccagcctgaaaataattctggcctgttgggaatgttggcttcatgttttgagaatttccctcgtgtccctgacttcagagttaactatttctttaatgaggactaacatgttagtgttgtctctgaactttatttgcagtaattcactaatggaagctttcacagccaactctggtaatgaatgtagaacagcgaccttctgtagaaaaggaaagaaaaaaaatgctttctgtcctcagagggatctttcctgtttggaaaaaccaaatggacaagaaaaataaatcaagcatttgaaggaaaggagctacatcctttagagtgttatatttgtgaaaattctcatagcctagagattttctttccaatttaagcaaggaggaattttccaatgtgaagctatttttacatggccattaatggggtatttttggtgcaaaaatagtttctggtccttggtgtagcaacctttacccttttagtcaaatgttttattcttccaaccacacacagtaggagaatttcttctctaacagtcctcataccttccccaaaaaaggagacagaggaaaggcaatatttgttttgagactgattcgttacatggccgatggtgacttgaaaacacctccctgtgtgtgttttctgggaaagagaggaacaagtgagtgttaattctccactctgactgggggccaacatccctttgatactcattgtgctgcctttcctggttaggagttcttggggcacttaattaccctgggctgaatattttttaccatctactccatcccatcatgcgtagtttgcatttgcaagttcggttactttgggagattgatggagttgaaattgatgatgagccagttgcacaggtttgtttgtttgtttttgttttgagatggagtcttgttctgtcgcccaggctagagtgcagtggcaccatctcagcttactacaacctctacctcccgggttcaagggattctcctgcctcagcctcctaagtagctgagactacagacacacaccaccacaaccagctaatttttgtatttttagtagagacgggtttcaccatgttgagcaggatggtctcaatctcctgacctcgtgatccaccgcctcggcctcccaaagtactgggattacaggcgtgagccaccaggcctggccgcacaggggttattaattagtggaatcatattgctcattgcagaggagcaagtagaacttaaatgtgttatgcattttgggtgtaacaaatttatgcatttagaatagatgttaatgtaacaaaagtgatgaaaaacttaaagattattatggtaatttatatattttttaattttgtagactagcttaataaggtgaaaggaaaaacaacttgttcttcatggagtttaagttcacatggatttatagtgcaagtagaaatcaataatgtaggacaacggagaaatgccttcattcttggatatgtctgtccagcaaatatactgataataaatatccctgttataaatgatgatgaagctgggtgcagtggctcacgcctgtaatcccaggactttgggaggccgaggtgggcagatcacaaggtcaggagatcgagaccatcctggctaacacagggaaaccccgtctctactaaattacaaaaattagccaggcgtggtggcgggcgcctgtagtcccagctactcaagaggctgaggcaggagaatggcatgaacctgggacgcggagcttgcagtgagccaagatcgctccactgcactccattcagcctgggcgacagagcgagactccgtctcaaaaaaaaaaaagatgatgaaaaatgagttgacagttgtgagatttgagtgagagattttgaacagttttccaaaccacactagactattcctattgagttagtttaaaatattttctaggctttcctgcagaaatgacttgtcatatttgtagatgaatatgttaattttgactgagaagccaggttaaatttttatttgtttccttaggtgtttcataagaatgtaagcaaccttccttcacaaaccccacacagtcttctaccaccaggttactcatgtaggataggtggatggaagaaaaacaaactttacatctaagaggccttcccttgcagcagggaaaaccatagctgcaatttaattctgctttgaggattttcaatctcaatggaatccttaagtgaaactgtgatttctcagcaagtatggtggctcacgcctgtaatcccagcactttaaaaagccaaagcaggaggattgcctgagcccaggagtttgagaccagcttgggcaaacaaaaattaactaggtatggtggcacatgcctgtactcaagaggctgaagcaggaggatcagtcaagcccaggaagtcaaggttgcagtgagctgtgaccttgccattgtacttcagcctgggcaacaaagcaagacctcatgtcaaaacaaactgtgatttctccacagtgatgaaaattttgtatgacataaactctaatccttcaactacttgctggtcatgttgataagtcatacaaagtccaactggcttccttagatttaacaacccacttaggacagaaaacccttgtggatatgtgttccttgacattcagttaatttaactaggtgtggtcttgaagctgccatcagatgtgggcagtgcagaatgggaagcaaaaggtgacatgccagagtagaagtaaagaattgtcttttaaccctgactcctttctcctctaggggtgatttgtgaaaagggtaagaatattcgagatacatcagtaaatgtactcctgaagtcacaaagcctgaagaaagttttcaggttattggacagaattcagtaattctgcacattcatgtgtctcaacacttttagggattactaattaagggaaacccattgagcttactattctcccatgttttattttaaagaccagtaagttaaatgcttcaagtgtaagactggtcatactgaacacagattaaatagacaaactacagaaaaatgcaaataagtggttgaggttgcttctggttatgatccatagaaattgtaaacaccagaacataatacaaagagggaaaagtggaaacataagagtttcatacctattgttttgatggttttacaatgcgtatcatagattttaaaagctgaactagcagttagttactagattctaggtatgaaatgggaggcattattgtatggtagttaaataaatttcacaaatttggaataagaccaagataaggtcttagttctaccacttggcttattccgttttcttaggtttttttttttgagacaggttctcgctgtgtcacccaggctggggtgtagagataggatcacagctcactgcagcctccatctcttgggctcatgccattctccctcctcatcctcctaagtagctgaagactagagctgttccctaccacatccagctactttttgttgttgttgtttggtagaaatgaggttatgctatgttgtccaggcttgtctcaaacttctagactcaagtaattttcctgcctcagcctcccaaagtgctgggattacaggcgtgcgtgagccaccactcccagccaatcttgttaataaatgatgataacagtaacaattttggaagattcatggaaataatgcataggaactacttagcactctgcatggtacatagaaactgctcaaatatccttaactctcattatcattaccagctgtcctattgttttaggaggataaaatacatatcttaagttaaaatgtttttttatttggttgtgtcgttttgcacggaatagtagggagaagcctcctgatttgtttctctcgtggaaatttgatctgtatctgctaaaaaatgtttatcccttcttctgtaaaagggactctttcccctacggtgagtagtatatagtgaatatcaatgctgatacatttaaactgtggaggcatcaggggaccaacctgcagtgatgctaagtggaactgacaagataatgacatgcgggttattgttgattaatccagttcactggagaatcattgggaaatgcatttatcctttcacctgaccctcccaaccccacaaaaatgatttacagtaatcttggagtcacccagtcctttcttccacatcttccagaacttaaaaaaaaaaaaaatccgatgtttgtactatttcccctcttccctacttttgatgacggccaatttgttaaaaatgtaagaatggccagatgtttggtgtttgtgttagtggcagcctggagctaagtatgattttttacagtgaggtaaaatacttgcttcttactctaccaagtactttttacacctccctttatagccctttttgtaagcaaagatgcctgacttctgtttctcatctgtgaagtatcataggtctagagtccattagacatgatagccaaatataaaacgttctaaaaatggaaaggtttttttttttttttttccgattatgtggtggcaaaacctaacctgtcctgaaatcatttggtgattgaagtagtaattactatgcttctagaaatatttttagctctccatctccaggcgtatggtagccttacttatcccgccctcttctaagttgagcatgactctcaaactcaatcaggcaactagaatgagaatatcgatatgaatgaggatatagacgtttgttgcctttagttggaatctttcagagtaagggcatgctttgctgtgttcttctatcctctatagtcagggaagtgtgaaggtggagctaccctctcagcctgggtaccccagtaagggagatgttgggcctagtcccctaagtggtgcatttgcagcatgagcaagaaaacatcttgctgttgtaagattctatttggaggactggtttgcggcataacgtagttcacccagagaagtatgtggtaaatatagggctttgatttttagtctttcatgtaatcagatgcactttcggagaagggtttcaatctcacttccaacctttgtataccttgttcctaatcacaccccatcatactataggaaaggtggaaggtggacagaatctgggatcccagcctcactcatggatccaaggtcagaaatcatctcatgtctttctgccagtgaatgtccttctcgtgacctcatgatattttgtgacatccctgatctgtccttcagtccatggaaatgcccctggctgtagtcatatttctctgtctatctaaccatgtgtctatctatattttcatatttatctggttggaagcatatatatatatctttcaaatactgggaaggcccaatattttgcctcattaggttatacatacatgataaacagcatgatatacattttaatatcaagtagataaaatacaagcttttctaagctataggtcatcactggtgaccctatcctgatacagttactttagagatctaaagagattagatattatattttcttattatatagtaccttaaatatgtctataacagataataaaatagtgcattagctcatatatactacctaaagagagacacttaatcttactgtatttatttggaaagtttaggtaatttcttacattaaaatatttttccttaaattaactgctgattcttagatcaagtcagttatgtattattgacctaaattccacgtacagtaattagtttttgttttgctggtcatactgagtcattgcgatatttctctggtatgtgattttagtcttctacatgccctttttttctcagtctatcaaggtacattacatagtttatttattctaagcgtttctacgaaatacaataattgtcactcactttttaaaggtttaaattcctaggctagcaaaggagtaagttattttcctatatgcagtcaaacctgggtgacacagtatggaagatgtttaatatctgtccatatgtctgtttattctttcatacagcgacacatgtgttgcacaactataacataccaggcatagtcagtagcgtctgggaatattcaagtgaagaaatctaagttctagctactccatggagaagatgcttttagactagaacaaggtagacaaggtgtgttttgcacgtagtctttcattttcatagtgcctggcccatgcttaacaccaaataggtagaaagtgaatgcatggacttgtaaccaacatgtgtctcatctggcctttcaaggaagtgctgtgtgaacccagaggaagtgctgtgtgaacccaggggaggagtgactacacatggttggcgtcggatgcattggaaaggcttcagataggatagtattggacttgagccaatgggaattggcttggtgaagacctccaggggacagggtgacaagccttgcctgcagtgacagcagcttgtgtgaaggcacagtgacagggattatgtgaaaagaggtgagctgtggttttcatgtccctgagggatctgtttatttgggccaataacctatatttcctttttttcccttggtcatgggtggaagatatttacctatatgactgattctgtacccagaagaggtgaaagcctagaacagatgatttctccaatatttaaagtgtaggttttgtcagcatctgcatgtgttatatagatatatatccttagcacgtggtgtgtatgtgtgtgcatgagcttgcctgtgtgtgcccgagtacgtgcctatgagtgagagagaaggaacttacttggcatgggatatgaaggaagatactcagtatttgttccgactcatgcatcccaacaaaggcgaagtaaatgtctctgtggtgtcccacataaaacatgaagcactaaataatattgagagagcctcgctgagccctccacaaatagtacattaatgtcaaggaagtgttgaggaattcccagacagcgttgtagttcaataatgaccgttatttatcacaaacgtgcactctgtttgttcacattgggtaatgaatgacctttctgtttccgtggccagggccaaacaggcctctgtcgaggcgggtgcaggctgggggccatttatcatgcctcacttagcccgatcactgccttaaacgacaccaccagggacatacttgggcttaaaggatcaggcccgaagaaagccttcatgggttaactactccaaaagcaaatactgtccaacccttcctgctgtctctttctcttggatttgatgcgactacagtttggatgaaatcacatgacaggttgtcagggagagtgtattaatccacaggaaaagtatatttccaacagtgatgactcttgcaggattttttgttgttttgttgctgtctgacacagcttccttttggtttttttaattgagaatttctgtcatccttcaagtgagagtcatacagtcaagaaaatcacccggtagattaatttagctggtgtaacatggtcctgaacttggaatgaaaggagacagagcgcctgtgtattttggaggaagaggttgtcttgcttgtgatctggttgggactgttgatttagtgtggaactaaagactacttcattttagtttttataatgctgtgatgttcttgtatcctccacatggtggatagctcacagaaaagaagaggagaaacctttgcatgtggtgatttaaatactgcagtgtgaagacagcatctttgttatacacagtagttgtccttaaaagttagatttacatcacaagctggtcaaatttattcactgaaaaatgcatttaaaagccagctctgagaattgctgtgatgtcatgtggcataaccctgggaatactgccagttctgaaaacctgtgtagcaaatcagaattgccgtatttttggaaacttcactgtgtgaatttcaagactgctatgctttggaattatacggtgtgaactgtcttactctgttgtcgtggaagaatactatcatcttttaggttgataatgtttaatttagttgtgtaattacagttcaaccataaaacccagaaatctgtcaatctctccaactgtctgtctatagatatcttttaaatagaaaacaaactttaggggcttctccaggtttgctgattcttgacagatttgtccacaatgttctcatctttgaatcttcgacttacgacttacttaaaactggtgatggttctttttgtttttgttttttttttttttttttttttttggagatggagtttcgctcttgttgcccatgctggagtgcaatgccgtgatctcggttcactgcaacctccacctctcaggttcaagtgattctcctgcctcagcctcccgagtagctgggattacaggcacgcgccaccacacctggctaattttgcgtttttagtagagatggggattctccatgttggtcaggctggtctcgaactcccgacctcaggtgatccacctgcctcggccttccaaagtgctgggatcacaggcatgggccactgcgccctgccgatggatctctttatcgggaggtataaatgcatcaaaatttgtggagctgtagtgaaatttgtgctttgtttttacttggtggcttcctttcttttttcaaagacctaatgagaatgtttaaataacagacatctgggttcagcctttgaagccttagcttgtactgtctgatattctcaagtttttgaggaatatcgggtcagtgatggacatttagctgcaaaatatattcctttagtgatccatctatttaatctcactgataaaaagatactgatactgatgagtatctttcctattttcatggaggcattattcaggcataacccaggatactcctagctgctgttgcagaatttttcactgaaatatagaaatatgtgtgtaaacatctgtctcacaacttttgtgaaagagcataatacccatttatggtgaagagaaggaataagcagttaagaaaggaagcagttgagtgaataattttgtcatttgacttgcataaaatcattgggataatttttacttataaatataccacacacaggaaggaccttttgttccattttaaaaattgcaggtgacacctgtttttttgtttttgtttttgttttttttaacctcatgttacttctcttgcttgatgttcaacccagcttaaagttaaagcagactcaagccaccattcattcattctgttgaggacagcatccatctggtatcttcttactttgttaattcagttattctatctacaattgtttctcacattgatgacttaggaatttcaggaatggatgagttaggaaaatgccaatgaccatggaaatagagaaaaaggtataccaaattttgggtgctttttgagttttctgtcttatgggtaaatgatatttttgtgcctttttctccattgcaaaaaggaaatagtttttcataagaattgctggttcaaactgtatatagataaacacacacataggatagatattgatgggtggtaaaagttttctaattggttcagatgagaagatttaaaaattacttaaaagagaataaacaacatcttgtctataactattctaggtggtttgtttttctaaaaataatgtaatattttaaaaatgtttctagatgatttcatttatacatggatttatacatttgtatcttataaatatcccagaaagagtcaatcaaaaaattatatctgccaaaataagtgtaatcatgttgttcagcctaacaagaagggggtgctttgcatgcacaattccatgcaaatgaattcacatttccatttagctgtaatgggcacattctccccacagctgtgcttttcgttgtgacatggagatagaagctccactttcaaaattattggatttggaaatggagttagaatattgaatttggtgcctaaaataataactatctctttttaaaaacattattatatgctcaaaaccccttccctggactaagtcatttaattctcataaccctatgagataggtactgtgatcatcttcagaacagagttttggagcatagagagtgggtaagcatctggggcagggtcatacaactgggaagaaactgacctggacttgaacccaggctttctggctttggaactagctctgttaagtgctgtgtgtacagccttcagggtatcaggtccttatctgacattatctcaccctcttcccccagtggatcttgtagggtaggtatcattatcttcattttatagctgagaaaactgagatgcagaatatgctgctctgatctttggtttttacttacttttttaaaaaaaatatttatttctagtttgtatttcagtaggtttttggggaacagggtatttggttacatgagtaagttctttagtggtgattcatcagattttgctgcatccatcacttgagcagtatacactgaacccaatatgtagctttttatccctcgtcctcttcccaccctttccccgctgagtccccaaagtccagcgttatcattcctatgtctttgcattctcgtagcttggctcccacttatgagtgaaaacatatgatgtttggttttccattcctgagttatatcacttagaataatagtatcccattccatccaggttgctgtgaatgccattagttcatccctttttatgtctgagtagtattccattgtgtgtgtgtgtgtgtgtgtgtgtgtgtacacagtttctttatccacgtgttgatttatgagcattacctcgttctccttctttttatttgaagggtggagtagagttagcctgaggtgcaggtagagtctcctgactgaaagttataaattgaattctacatatgaccctaaatatatactataggactttcactataatgcccccaattttgcagggcaatttgctacatctgtcaaaatccagtgtgcatgtgcttgatatagcaaatctgcttaaaaacgtgcagaagaaatctctagggcttttactggcttaatctagtttatttcagaatgtcagatcttgcgcttggggtggtgtttgtgacaattccagacctaagcgagagtccctgcgaggatgtagtgagcgtgtgtgccaatgccctggtgaatcctttatccccaggcacttcacttgctttcctcattccggcaaagtgttttcctttcttttctttttctttttttggagacaagtctcactctgtcgcccaggctggagtgcagtggtgtgatctcggctcgctgcaacctccgccacctgggttcaagcaattctcgtgcctcagcctcctgagtagctggaactacaggtacccgccaccacgcctggctactttttttgtatttttagtagagacggggtttcagcatgttggccaggctggtttcgaactcctgagctaaggcagtgtgcccgcctcggcctcccaaagcgctaggattacaggcgtgagccaccgcgcccagccgtgttgaagtgttttctatggaagctcatctttgaaaggagagctctgtgtaaatgttaggtattctcatccacaaagttatgggtcttccttatttctcatctactttattggcttcaattagtcacagcacagtaacttaaaatgattaataacatggaggtcagcttaggatttcagaagatgcttttcttgggaagtaaacataacggattgcttatatattactcttttaggttatttgtcaaagaacacatttgccttggaaggatgtttgttacagcatcttttcttctttctttgacatgttgcctctcctgagtcatttcttcacaaaaagtctcttgtggttgcaactgttagatggagctttgataaaaattggtctcagaatcatctggaatatttatattgtcaagttttttcatataaattattttatggccttaagagtgtttttttctcaaagatactaccctggcagggggtcagtttacagttcaaaactttgtttgctgttgagcttaattgatttaaaaatgtgcttctagccaggtacagtggcatgtacctgtagtcctagctgctcaggaggctgaggtgggaggatcgcttgagcccaggagttcaagactagcctagtgagatcctttttcttaaaaacataaggcttgccacggtggctcatgcctgtaatcccaacactttgggaggccgaggcaggtggatcaggaggtcaggagatcgagaccatcctggccaacatggtgaaacactgtctctactaaaaatacaaaaattagctgggcatggtggcgtgtgcctgtagtcccaactactcaggaagctgaggcaggagaattgctttaacccaggaggtggagtttgcagtgagctgagatcgtgccactgcactccagcctgggctggagtgagactccatctcaaaaagaaaaaaacatgaacattttggttctgatgtgagctgccaattttttctcatcctggaagtttcctaaggcaaacatattgggaatccagctctcagaaattagacaattgaattatatttcatctagattgcccacccaagctagtgaaagcttgggttttgattttggttgtgtttaataattacaatccttttggctgtgttttctatctgaaattcagctagatatagaaataaagtccaaatatacctaagattcagcatcataaatgtcaggttcatggaaggattatttatacttgtattgagaattatgctgtccagtttggtagtttccaggtgtctcattgtggcagaggcaggctgccttcctttggtcgttactgtgcctcaattacctcaatattctcttgagagaaaagggcttaggttattccattagcctctggtcagcccttcctgactctactgttactttctcctgctccagcctcctttgtaaatgtggaagtcaatttcctattcagtgggatcatgtcattcctactccccccttccccaggctggagtgcagtggtgcgatctcagctcactgcaacctctgcctcctggattcaagcgattctcctgcctcagcctcctgagtagctgggattacaggcacacgccaccacacctggctaatttttgtattcctagtagagatgggatttcaccatgttggccaggctgggctcgaactcttgaccttgtgatccagccacctcagcctcccaaagtgctgggattataggcatgaaccaccacgcccagcccgttcctgctatttaagtccttaatggcctggccttgttggtagtctgaagtgtcacatcagtggttcttaaaccaacctttttatcaggatcactttgggcatatgttaaaatatacacacgtgggccgggcacagtggctcacacctgtaatcccagcactttgggaggccgaggtgggtggatcacctgagaggtcaggagttcgagatcagcctgggcaacatggtgaaaccccatctctgttaaaaatgcaaaattagccaggcatggtggcacatgcctgtaattccagctacttgggaggctaaggcaggagaattgcttgaagctgggaggtggaggatgcggtgagctaagatcgcgccattgcactccagcctgggcaacaagagtaaatctccgtctcaccccccgcgcccccccccaccaaaaaaaaaaatatatatatatatacacacacacacacctgaaccccactgcagattaatggctctttggatatttgtaggcctgctctttgttcttacagctatgtgtaggaatcactggtaagtctttaccttccttgtctcttctctttccaaaccattgttctttgtttaggcctttgttatagaacatagcccttttctgttcatccactaccctctgacctctctgattcatgtacccctcaccttcctcattgttttctgagtgtgtagtacatagtaagtgcttgaaagtggttgaagtaatgcagtttaaagttgtaacattttgaggcctggtgttgatctacaaagatggtaggctcagttccaaacaagacactagcctttcctgtctcctggaggccagctttacttagggatagtgataataaaatatagcagctactatttactatgctcttactaccttccgggtactttgcataatgcctctcagacattattgacatcaaggcctgaactaggaatatcagataataatatctattgccatcactttgtagttgaggaaatagaggtgcagtaagttttaataacttgctgaagatgatgcagtttgtaaatgggtgaagttctgtttgaaaccagtttttttgttgttgttgttgttttttgtttttttatttgtttttttcagacggagtctctgtctgtcacccaggctggagtgcaatggcacaatctcggctcactgcaacctctgcctcccgggttcaagcagttctcctgcgtcagcctccctagtagctgggactacaggcacacgccaccaggcctggctgattttttttttttcttttgagatggagtcttgctcagtcgcccaggctggagtgcaatggcacaatctcggcttactgcagccttcacctcctgggttaaagcgattctcctgtctcaccccccagagtagctgggattacaggtaggcacccatcatcatgcccggccaatttttgtatttttgtaaagatgggttttatcatattggccactctggtcttgtactcctgacctcaggtgatccgcctgtcttggcctcccaaagtgttgggattataggtgtgaaccactggacctggttaatttttgtatttttagtagagacagtgttttgccatgttggccaggctggtctcgaactcctgacctcaagtgatctgcctgccacagccacccaaagtgctgggattcacaggtgtgagccaccgcacccaacctgaatccagctttttcatctttagatcttgaccttttgacagttacccagtaatatctcctaaaatgtgggatacagtaaagtaactggaagttgagtcacaagcagggctcctgtttgcccatgtcttgctgaatgttcggcatgcagggggtactagactattaaaggctgaatacggaggtgcagcctgaatagtacgtcatagacaagagcggatcagcagcattgattgaacaatagcaaggttttagcctggatttttgtgtttgaggtgaaggaaggggatgaggaatgtctgtacacgtacacatgtaccatatttttcacttgagggtgctttcactgatcaattttgagggattattgaaaataagtgaagacattgaaaccagatgtattagtccattagggcagctataacaccacaaactgggtgacttaacagaaatttgctttcttacagtgcaggaggctgccagtcaaatatcagtgtattgcaagtttgctttcttctgaggcctctccccttggtttggagatggccaccttctctgtgtgtcttcacatggccttccctgtctttcttcttcctcttacagggacatcagccttaatggatcaggcccccgacacttttgcccacatttaaccttattcacccctttaaaaaccctgtctccaaatacagccctgtgagggcttcaacatatgaatgttgcaggggaggcacaattaagttcacaacaccgggatggttaaacaactgccctgagatttcagatggtgaatgggagggaactgggcctaaaagctggtttctaggacaagtggtgaaggtgctcagaattattgtcctgaactcagtatgtgagaaatagttaaatggggaaggttgtgctgttgggttatctacctgaaatcagttgaagaatcgtttttggtttcaaataattaaccctagaagttgggcctgactggagacttaggccaccaaaactagacaggtttatatagtttcttttccctttgaaaggtcccttttggatttagtttcaaaataagatggccaaatttaacctccctgaagtttcatcataccttcaagtttttcatgtgtgtgaatggacagagtgcccacaatgtgatattttggccccacatggtgattaaaatcaggcttttcctttaaaactcttcaacagtttatggctgggcatcccttaaataaaaacagtctgttaaataagtgatggtataaatctgcttgtatttggaccttttgaacgaaataccagaatgactttttaaaaatagttgactaagttttatttcaataacactgtaatgttccatatcaaatgactggtcaaaaagtgacatattgggtattcttaccactctccctgagctttttcttcttcatttgctttctcttgctaaaactgtcatttggaattagttcttgtcttatgtttctgtaaataaaattgatagcatgttattagtgtctttgtttccagaattctgagagtttgcattttaaaaggagctatataaaatctaagcttttcatgcttaataggctagtctttaagtgaacaatagtgtgaagttagcacatattaattaaaatgtctgcaaaaccaaagctttatgaattcaataagcattgagaggagttttcaggtctctgatttatgtgttcctaccagaaaaattttaatattgtaagcaaatctaaaaccaacaaggcatatatcctttaagataatagataaactttcaattaggggctttaaagaaagtaacatcactgagaaaagaaatttcacagaaaattacttttattggaggcaggaaaagcttatttaatgtgttaaatatatttaaatagctcttaagttgattacacctgaaaaatatttactgttcggtagattagagtttggcctctgtagaatgaatcttattttagatgcacagaatgtagtagacacaagagactattctatgatactgttctgtttctttaaaaatatgtccagctgctcctggaagccccagatcaacaaggaagataaatgcaaaaacaaactaaagtaaaatagttaatattcttcagctgctagaaggctggaatttctgggaaggaccagctccaagagccacagcttaaaacattttaaactaaccttgtcagagttgggacttgaactgaaaagataggaatttgctttaaaatagacctatatagcaacagtactttcgtatttgaaaaaaatgcctgtaaaatatttttaatgaagtctattttaaggttatagagctaacacatgttccatatagagaatttggaaaataaacatttagagaaataaaatcgcaattaattacattagggaaaaagaattgctttggacattttctgaattttctttctgtaccatacctgcttccctcacctctcaactctcacccccttccccctcgttgcctacacagcattttttgtcgttataaagctcacacccttcaatgcatttggtatttattttgtaatcctaatgcatcttagagttgtgtgtattttatgtggtactatttctttttcctccaaaaaagctgctattaaaatgactgcgtatttcagaattcatggagtcttggaatttagagaatatagcacacatatatttatgtatacacttatagtttatatgcacatatatatttagatgtgtgcctgcattttccccttgatattatatcataaacatttcctggtagtattagggtctaggcacttgtaatgtctaaatcatattaatttatgtgattgtgactttattgatatgattttgcttcagtcacttaggttgcttttagttttttgactaagtgtagttaacattcttaagaatattttttgctagttttctgtctgaatatccaggacccatttcgatctgtattctttagttactaaatctttaaaatttaaaatattagggtttttaagcccatataattcaagaagtaaatgctttatatgttgaattatgatttgggcaaatgcatcttattgttttagggcaaaaaacttaagctttcttctattaaagtgatttaataagcactttgtaagtgtgtaatgaggatgatttgggttttattacaaatgatgtcagtgtgaattgtgtaatgatttcttgctttggtcatactaatttaagctctaggaataaatattcttttatcaaagaatcattgatgactgggcactctgtgggtgggtacatgggacagagaatatatttttacctttggagtttatattgggggagggacaggtcatgtggagacaaacaatgcacaagtaaacaaatatataggatacagaaaatttcagatggagttttttttgtttgtttgtttttttttttttttttttgagatgaggtcttgctctgtcacccaggctggagtacagtggcaagatctctgctcactgcaacctccaccacctgggcaagcaattcttctgcctcagcctcccgagtagctggatctccaggggcctgccgctatgcctggctaatttttgtatttttagtagaggtggggtttcaccctgttggccaggctggtctcgaactcctgacctcaagtgatccactggccttggcctcccaaagtgctgggattacagatgtgagccaccacacccggccgataggtagctatcttaataatgcccttttccatccactgattatcttaccaactttaacaatgaaaaaagcatcaacgtatatattgggaccgttatagaagtttacgccaaaaatgttaaagagatgttttatatatacttgacacagtcatattatagtgagcaggaaagaacctttctatttaatatttgttctcccaggtcatgtgtttgctgaaaagccatcagttaaagcgaggcggccaggtgcactctctaggtggagaaattaagagcctgttgctctctttacagtgattttagttttgtgaggtttcttgtttcttttaaaagaaagagaaaaaaatatctttgtcctgtaggtataaagtcattatccagactaatggggcattgaactaacaggaggtacaaagtggactcttttcaaacctttttattgaatccgtttcactgtcaggtcaaacaagatgtgattaaacttagccctcgtccaccaccacccccaccttacccctctgcccttaagaaatgttttcatgcttaggaaatggcaccacaaaagaacagtcatgtgcttctgtccactggcaatttaccaagtgaaataagctgaaagtaagagaaaaagagagtactactgtggaatagtaaagctgcttgagaaagatgtgtaaatacaggacgataaaggaatgtgccagggcgacagagcgagactccatctcaaaaacaaaaacaaaaacaaaacaaaacaaaacaaaacagactttttgtaccagagctctaagagttaaaaatttcaggcaaattacccataaaaatcccgatggtggaagggtggaacaagagaacttgggtcaccacacaactctatgacagtcattgtagatggtatgcacagagtttgttgtgacacagcaaccctgataagtatacaagaaatgaaagccttagctaaatgtttctttataggattgcaatttctagttttatttaataaacacagttataagaaccaatgcagcactgaacaggacaagagataaatgagcctgtctctgagtatgcatcacaccctataccatgtttagttcagaacagccaaggttagcaacctcctccttcaaatatcacaattctatgtgcatccatcactcagcagcaataacgtttcttattgcttctaaaggcaatgccatacacttggaaagctgtaatttcactgcaacacatacatgcacactacacacaaacacatttatatgctctctcgccagtctggtgagcagcaatccttgactcaagtcttcagtctgcaccttcgaaagtaccagaaatgtccctttaggaagacagttcagatttactttcattacatgttcccctccttgtattccagggcaagagaggaaagataatagaaaagatattgaaggcccacattaaatcaacccaacttacatttagtatgtgcagtacacatttaaattatgctgtaacagagatttctactgctacaacacaacttgtttccttttttctggatgacacagataaagtgaatttttcaaaccctctcagggcaatgtatgtgtggcaaaaaaaaaaaaaaaaaaagaaaaagaaaaagccaatggaaagtggcagagtaatatttactacttctaggcctgacccataaaatgttcccagttagatggggatggcagagctacaagacagaaggagacttggtccctgaatgacaacctggaggggagcatactgactcaccatacctgtgctactaactttgcataagttaagaacaaacttttattctgttgaaccactgagatttgagagcctattacggccaccatcattattaatacatgcccaagccactgcaaatcaaatggaaatccaaattatatttcatgaaatgtctggtatctctcttacagctctgttgctctagcctgatttatactacttcccacttcatagaagaagttttttatctctcagtttcatattgattcattctgcaaagaaaatccagttttaccgaatgtcaatttaaattttgataagccacaatcccaccaatatttgaaaatggccaagttaatctatagcccatctgaagcaagaaccatcagaaataacttgaaaaaacaaaacaaacaaaatcaagggtttatactgtaagaaaaagcatagaataaagttggtatttaaaacagtgtggtactgccaatatagattattatattgtatatatacacacacatgtatatcacacacatacatacacacggatcatagaaacagacccatgtacaaataaaaaataagagatataaatgaatacaatgtaagatagtatctatcttcagggagtatcctgagacaattcaaggtgggcaaaatgaaacattcattgaaaagttttggtgaagaagaagttaaaatgatgacttagggttgtatgtcagatattttaataatgttggcagttcctagattctacagtctttctcaaaactaagaggtttatccctaaggcaattttcttctctttttttactaccaaaaatgtttattctatcggcaggtttccagtgactagaaaaatttccttctttacaactctgaaatcgtagctcaaatcattttctaacagagtgaaagtaaaaacattattagttgatgtcagcaccagcagaaaatctcttaaaactggacatttctttaaaaaaaaaaacaaaaaacccagttttccaagtcaccaattccatgcacttaaaatgctgcaaatttcaggtgaagtaaaataatattatagtttatgttcatgtcattgatagcttggaaaattcacattttacaactctttttttttttttttttgaaatggagtctcattctgtcgcccaggctggagtgcagtggcacaatctcgtctcactgcaaattccgcctcccggtttcaagcgattctcctgcctcagcctcccgagtagctgggattacaggcatgtgcccccaggcccggctatatttgtattttttagtagagatggggtttcaccatattgtccaggctggcctcgaactcctgacctgaggtgatctgcctgcctttgcctcccaaagtgctaggattacaggcgtgagccaccacgcccagctgaaaaaaagtctgtttttatatttgtattgcaagttgacactactgatgaaatggcgtattagccttgctagataaaatacaggatgcccacttaaatttgaattttatctgaatttgagataaatgacaaataattttttaggataagtaaatcccattcaatatttgtgacatacttatcctaaaagttatttgtcctgtatcagaaattcaaatttaagtgggcatctgtttttgttgttgttgttactgtgtttttaagagggagagtctcgccctgtcactcaggctggagtacagtcatgtgatcatagcttagtgtagccttgaactcatgggctcaagtaatcctcccaagttgatgggactataggtgtacgccgccacatctggctttttttttttttccccctgtttggtagagatgcgtatcttgctatattgaacagggtggtctcgaactcctggcctcaagcagtcctaccgccttggtctcctaaagtgctgggattacaggcatgagccaccacacctggccagcatctgtatattatttgctaaatctggcaaccctagtttctagaacaatttcatcagactttaaagggacattgaatggttagatagtaatagggatacctacatcaaataactggcaatagttgaaaggttttttaactatataaactagggcaaggctatatctgccttatttgttgtttctaatcttattacagtgcttggcacatacgtgctaaatattcagttcttacgtggttgtttatcaataaagggaaaattgattcattcattttgtcattctctttcttttgggtttgtcacactttccccagcaacctaccttaagcattttatgagtggagttgtttcatgttcttcttttgtgtttttaaagtattagtgatttaaaaggcacctgccaaatacctggtaggtgcttggtgaatgaactgtcaaggtttttaatgggtgcagaaaactgagggaggtgatgggagagcagcttgtggttaccgtgttgaaatttaacaaataattttaggttatagatgaggacaaataacttaacagtgaggacaattaaaccgtggggtggcctcttgaggcaaacagcagagactgttgctttaggcagccaaaggcaaatgtttccactgggaagatgtctattgatcctattatcccgggacttgaaataacatttccattttccccttgaaaacccatgatgctgtttttaaaatcacatacttcatccttaaactctcatgcaaagctattacttgagttaaacctctcaccagaaatgtcttcaaggagtattctctctgtaaaggtgtatattgtggaagatgaaaaaaggaagctctctttggttctctgttacacggggtggctgctttgcaaggtgaatcacttcggagactgtgaaatatttcatgtcttataatgtattttccattatttttggtccataagcatgtatattaataagttgtacgaaatcaaatgtcagaggttcagggagacagttttgaaatcccagcattttgtgagtggaggttgtttcctattcttttgtgtttttaaagtattagtgatttaaaaggcacctgccaaatacctgataggtgcttggtgaaatgaactgtcaaggttttttagtgggtgcagaagactgagggagggtcccagtttgggatgtgaatttgggttccagatgtaacattaatttgcgctgtcaccttgagcaaagtgcttaacctttgaaagcctcagcttgctcatccattaaatagggataataatagtaattattgtgaagattaaagaagatctgcctaaagcactcactacggtgtctaatctctgataaatgctcgaaatatttgatttgctgtattttattatttatacctgtaatttaaaagagacaattattgttacattgttaaggcttaaagctacaatagcaagtaattaattcgtacaatagcaattaatatccgagtgatgaattgtcttcctataagaagcagctaggaatgtagtcatccatgtgacggttgcaggtcctagggtggtttcttatttaaattgtaaaggaaacagccactggggcagctcaagaaacaggcttcagagtcaaaaaaaacacccatctggattcccttcctgactctgaggctcattgaccttgaataaagtaccttatttaccttctctgaacttgggcttcctccttgggtaactggtggcaccagtgccttctatgcatagagcttgccacagtacctagaacacagcaagctcttggtaaaagcacagtgaaagagagacaatatttttattgggcgtggtggctcatgcttgtaatcccagcacttgggaggttgaagtagacagatcacttgagcccaggagctcaagaccaacctgggtaacatggcaaaaccccgtctctactaaaaatagaaaaattagccaggtgtggtggcacatgcctatagtcccagctacttaggaagctgaggttggaggattgcttgagtccaggaggtggaggttgcagtgagctaagatggcaccactgcactccagtctgggtatcagagctagaccctgtctcaaaaaatagagagagagggacaatattttgcgactgtgctgtctagtacagtaaccactagccacatgtggctattcacattcaaatagatggaaaaataaaattaaaaattcaattcttcggtgtttggagtggagttgtttcccctttcccccagtcatatgttgaattcctaacccctagtacttcagaaagtgaccttctttggaaataaggttgctacagatataatgagttaagatgatgccatacgggagtagaatgggcacctaatccagtataacaggtgtccttatgtaaatgggaaatttggatggagatacaagcacacggggagaacaccacacaaatgttaaggcatggatcagggcaaggcatctactggccaaggaaccccccgaagattgccatcagcccacgggaaacttcaagaggggcatggagtagatcttcccctcatggctctgagaagggcccagtgctgctgacaccttgatcttggacttctgccctccagagctgtgagacaacaactgttgttttaggcacccagtttgtggtgtgttgttattagcaccccaggacactcatgcactcagtctcaccggctgtattttgagggctcaggagccagtgtggctaccatcttggacagcgaggacactgaacatggctatcactgcagaaaattctaatagacctccctccttcggggattccaggttgctcattgctccaaaaactcaagccaagaagatagaagaggttcaaatgattgtatgaagcatgttctttgtctggaaatccagaacaaaacaaataaatgatctttgaaaaaaaaaatctctgccttaaagttgggctggtcaacatgtccagatattcacagagacttcctgttctggaagagatgcagacagaggcttaagacagccttctgtcctgtgacggacgaatttctgattctgcttccactgttaaactcttacataattgcattctatatagagagcttccctttggatccagcttgcttttccccttgtcttcttcctcagactttatgaaagtatttgcagagacgccttgtcccctgccatgagctgtaaatacttatgcagatgaagggtttgttactctagttgatgagtgttagggaacctggagcctttcctggttttgagctgtggctgaggacgtaggcaattctcatgcacactttgcattggctgaagtgcatgtcctggagtgcctcatgctacaggactggcagtgaaaagcctcttaggcttggggtagaggtgaaaacctccctccatgtttgcactctctctcgccatgcccccaccttcacgcgtggttgtgactgctgggtggggctgaagtcacagccttgctgcagtctttgccctaggcaggctctgtatgatctttggtcaagggaaagcactttgtgtgcctgacctctgagcagcccattttggccctgaaatcctctgttggcaaacttcacattcagtgagtcagaattaaaggaaaatgctgaaggaacatttgcattttttatcttttccaagttaaggctgttcttttccaaagtggagttatactttagagtatcttaatatatcttatagcaactcatcaggtcttgcaaatgtattttatcttttcatattagaattatttcagactatttttattcattatgcgttttgttaaaccaggttgttcctataatgaacatggaatataaagacttgctcttccctaaattgctcagtatactatatcttgagtcgtctttatgctcaatctaatgctttattaaaggagaagacacacccacacacatgtatacatgtgtaaaatacctgtactgtgctcctactatgtgtcaggcactctgccaagcacaatgcacttgttttattccttacaataaatctcataaagaggcaggtaattcaattcatcttcacattatagttgaggaaactgaagttcagggaagtcaggccatctggctggagaacagtttgatatcacagcaaaagttccttcccggagtgtttgtgaaataatgatttcattaaacattgttcaaacctaaattgcgtttgttcttgcagtctttggagtacactgggccttttgcagttgggacaaacccatttcctctctcagtgggaaacactccaagtattcctcttgaaacaaaacgtcaaagattatttttgcagacttctgtggagtcatttttggacaacaccctggaacaggaaaccacagtttctcctaaatttgtacaggatggaaatagataacattcttcataaaaccatggccacaattaatgctttcaaatcaacataatggtggatggtttgttttttgcatttcttacctgaatagattatgggaacctgcagcatgggaaatttcatgaataattttacagggttttattttataaactggaaatgcggtgaaaagatatgtgtaggtgatgaaaaagagtgctataggattcaacgtatttgaaagctctccctgaaagatggatttgaaataaaacagagtctcgcaccctaagttatgggaatgagatttacgctcgctgactgaagcccaggtgctgctaaaggttaattagtgagagaatgtgatgaacttaatgaaataggtgatgatgcagtgtgagggaagcccacacagtcatcaaaagataaatgcactgagacattgtatttttcttttctttgctacagaggagtagcaacaactacacatagaacaaatccagaggagtagctacagctacacatagaacaaatcctgcgtatacccatagcaggtccggaaggactggggtgcttaactacagactttgctgggagccatcgttccataactgctgaaactccttttattttaggtctgtttctgcgaagtcctgatagctgagttgacttaagaggagttggactaaatttttaaggctactttatttttatgattgatttttaattattctaagcaatacatagttattttctctgggcgaaaagttgaaatgtttcatacaaacctcatttccttgtttcctaaccccagacccttctccccttcttctcaaataaaagctagcactagttttgtgcatatactactagtttgcttttaacgtgtatgtatgtttatattttcttaggaaatatttaatatcctgttcttttatttatttatttttattttttatttttgaaaccgagtcttgctctttcacccctgctggagtgcaatggtgcaatcttggctcactgcaacccccgcctcctgggttcaagcgattctccctgcctcagcctcccgagtagctgggattacaggcacccaccaccacacccagctgatttttgtattttttagtagaggtggggtttccgcatgttggccaggctggtcgtgaactcctgacctcaggtgatccaccttggcctcccaaagtgctgggattacaggcgtgagccgctgtgcccaatccttgttcttatatttttaaacatagaaggtatgacatatatgtttttgtgtgtatgtgtgtatatgaatttcatacttttaaaaaatgtgtcctatttgtaccttgtttatgttaatcttcttcaatttgtatatacttcctgttttaaactgttggacagtattttcacattgtggctattttatagttatttatttgcttctcctttactagatgtttatattgtttatatttttattgacattaagatggtagtttaccaacatctgtcttcgtgcatccttgtacacatacgctgcagtttgtggtagacccatttaaaattttaatagacatgcaaaaatgagagcaccatcttaaagcaaatcttagagatcctttttgcaaagcaaaacatgcctttgtatgaaacaggatatatttaaaggtacatctcaattttgctttcctgtgatttctggcaagatgaagcttgcgtgggcacctgtgactaggtttctgagaggctccagcactgtccataggtgtcaggttaggtaagattcttagaatgttaacggtaactctccctctttttgcctgttcaccaatagcagaatgcccttggcagatgaaggaacactatatggtactaagactgagcccacaaatgatacatagtaacctatgctgtcagtcagtgttgcaaacaactgaaggctgctatggcttagtttaagcaaagatggactttgttggagaaaggggagttggggaaatctctagctgagctgaaaactccagctcagaaaggattagattcagggaagaatctaatcagaactttttcactgtctgtatttcaaagtctcttcattgtaggatgggtctattttataggagggtgaataccctgtttgaatggttcctcaagagaggatctagttgggaaacatattaacacaaaagaaaaccgagctgcttttaggaatacagatgcttggtggccagaaaatatacaatactagctgccatcaaataaactgaccaatatatctcatggcgtgctttatctgtataaacgtacctaacattttccaaatgtgcttttcacatctaatattcatttatttgcatggtggaaaaatgggttgtttgaatcaggtatctatttttatagaattagattagggtgaagtacacttaacatttaaagcacatttaaattttaaaatgcctgagaattgtcatgaggagtcttggaattattagacttttcttgatgggtttgttgttacttattggtaatgagagagacatattctgattgaggttctagtacagctgctacaatcagtttcttctctttgccttcagtagcataattgtggaggtgaaaaatcagaaggggtagttcaaaaagtagttttcatgttaaacagccattttaaattggagtcacgtaattttccagtgtcttatgattatagctatctagattggctgaccctcagaaactgtgatgaggttaatattagtggttttaggccactagattttgaggtaatctcttatgcagcaatagataactaatacaatgttgatacaattggggctgtatttttggttgatggtaaaatattttgagttcttttggaactagattttagggagtttaataaacccatttttgttaatttctttttaaggtgtttggatacagtattagctgatactacttttctctctctttgcgtctgtccttcactaaacataatctttgaaaaggagacatttttgtttgtttgctgtgctttccaagaaggatggggtctgactttctctttttatggtcagttataaagttgtaataaggattattttgacctttctggagaatatgtcatgacaattatatttcaagcatgttatacagtgattataaggtgggtccagtacttggaataacaattcacaaatggaattttacagtaagacacagatctatgtttagacaaacctacttgcatacttcggattttcttacctgaagagttttttaaaaaccatggacatatactgttagcatccagcttcagtgacgttataattgggatgaggtcttactgataaatattgtgtttcttacgaacatggaagctgagtcccagagagttaaattgatgagtctttggtttagaggcagaatcaagatagaattggagactctgtatttctaggttactttgtggtctttgtattatggtgcctatgtctttgtcaagttcacggtggctatggagatcctgagctttgagggccatgtgtgaaagcaccatgcaacagtttgccttatgaaaattgcctgatttattcttgtttccaggggcctattttagaaatgttatctcagtaacgcgtatggacatacatgcatggacttgcaaaggtcctaaaagctggacgtctcaaagacctcacctttatgagtaaagtagacattgattgccactgcctacctgacatccatgtcccttcctctttgcatctgttcatctaaattccatttattgaatgatttctttgtaacagctgttgtgttacatgcaggggataggatagtgaccaaagcatacaaacatgcttgtccttgcggagcttacgttctactgtgggaaacagacaaagagtaagaagtatgttgtatgatgataagttctaaatagaaaacattaaagcagggaaggggggtttgagaaaatggaaattttagagaaggtgtgtgcgaggttcagaatggcccccataatccccacttccaggtattcacacccttttttagtcttgttaaacaaagagagctggtttgtgtgatcagttgacgatggcagaggtgacactgtgtgacttcttaagaccaggccgtaaaggaattgcggcttctgcctttgggcttactattgattgtttcctttggaacaagctcactccaatatcattagaacgctggggaagaactgaggctccaccaacagctggtaccattttgctggccatgtgattgaaccacttaggaaatggatcctccagtccatgttaagcctcagataactgctgacccagctgacatcttgactgcaatctcatttagaaaacttgtttcagaactgcacagctaagccattgctacattcctgacctatagagatggtgacagataataaatgtttattgatgttctaacttagtgagttttgggggatttagttacacagcatatgacaactaagatgcagagtgctaggaaagtctttacataaaatattccttttggggaattcactgtgacccctttgttttctcctccaagttgatgtgttctggggtgagctgttttccttctctgggctctaggaatggacacatgacccaggtctggtcatttaggttgttaagattgctttgattggattggagatgaatatgtggccatggccatctaatgaaagtctcctgtgctttacttcaaatggccacatcaaagtccttcctgtgctgaggcttctgtgcttttcagaacataagctcagaggaaccggtggccattcaaaagagaaaggcctgtttgagagtgcagccagcactggaatgcagaactgagttgacagcaagagaatgagatctcttgagagaacagcagccctgtgctgctagaaggtagcagtactacacacatgcacaacagatgtaccccctgaatagttacgtgagacaataacctccttgccctttggttttcttttgtttaggccactttgaggtgggatggtttcactttaaaccagtgccctgagttttcaccataattataaaaacattgagcctcggtttcttatctgtaaaataggtctgatttcacctattctcatctataggctgtgagaaattaataagggaagacaggtaaagtacctggcaaaaaattgattcctctgtcttctctatttactctgtttctccttcctgcaactatgtaccccattttgtttgttctcctaaggtctgtgcctgttcagtgtgtacacatacatattcatggacatatgaatacatgctttttaaaacgtgcactattagggaaactgtactggtgcactgtaatatacatgcagcattgtcagtctgctggcttatcaagcactgtgctagtggactagatatagatgagatacaggaaggtcttttcccgtaagaagagcagtctcatgtgagtgggcaatacttacctgaggtttaaactaggtatcaggtaagattatagctatttgaagatccacatatcctaaaaacctgtaatatgagggtcctagagaaggataatgctgacagtgtgatagagaaggttccgttatattgctggcttattaataaaattgcatattacaattttgaatttaagatgccaaattctatgttttagcatttttttctttggtgcctaaatcgcacatttgcattaatttttctagtagagggaatgccgctggtttatagtggtatgaagtatttttggagatggctgtgatttaatttcttcttattttcactgcatcagaaggtgaacgcagttactgagtggttctcttgtttgacaacaagcctttcccttgcctgttttgttcccagccttgtacttaggtccctaaaagtgttactaagctctctgggattgcagctgctgaccttaagacatgagccacctgtaaggtaaaagtaatagtatagaaagctttcataactgggctcttgttctagattagccgcctttccttttcttgtaggaattcttcctcaagcagttctctcagaaccatgggttttgtagtcatctcattgcagattgtaccttcagtgttttgtaattaatctcctctagactttcatggtgtagagaaagatgttctcataccccttccaaaacagcaggattcttgcccaagtctggtggttttcaaagtgtgttctggaattctgtggttgcttggagtcttctaaaattttactttctatattttggtcttccatgtaaaacttcaaaactcagtttcaagaaaagcttctaaaatagctttaaaatgttcatgttaaagtagactttatagtcttgtaatgttttactaaggggtataaaataatatgaaagggtaggccttttttttttttttttttttaaaagcaaagcactgatttaattatagtaatttcttacttttatttctctcttagtacttctcatactcttggtttactggtgcttcaggcctcacattaggaagcttgctgaggtgtaagcctgaggtagttggaatgctgtcttgctggggggctctgggaccttggaggttggcattaaaccaaggaagtgtggagcaacagccactagatgtcaaggtgttgtggaatgggggagtgggtttcccttgaattaggaagaaacagatatctctatatccctctggccacataacttaaattttacttcttcctatttccagaagaactttcccttcctcccatcatgttttccttattgattgggaggatgctagtgatattgatgggtgggtgctagtgacagtcaagtgtgatgccctcagtctcttgtacttacgtagaacattaagactaagggtcttttaaattgtaaaatacacataacataaaatttaccattttaaccacagtgtacctctcagtggcgcttagtatattcgcagtgtgatgcacccatcaccattatctagttccagaacattttaatcactccaagtggaagcctcatacccattgagcagtcactccccacttcccatttcccaccgccccggcaaccactgatctactttctaagaccaagaattttacaaggtattttagaaattacaaaatttatattttaagctctagcataagaacaagccaaaagaaacagttacatggaaacgaagcccacagtttgcaccatgatttcattcttcttttcatcatttctgatttgccatctcaaccttggttccaaaacattttgaaatatatccttccatactttttttctcattgcatgcatacaagtgtattcccgtattttgattcattttctgcactgtttataaatatagaactatagtgtacacatccctctgcaactagctttttctgaacaggttttgttaacatgtctccaggtcattaacaaacaactctaacttattcactctgtagctgtgtaatatttcataaggtggctgttccacaaattactcattatgctgctcttggaggccctttgaagaattagtaattaatgcttagaaagtcttatgaggaggactggacaggtagaattagcccattttgtatgttggggcactgaacctcagagggtaaaccatttaaagtcacataagcagtactgctatatgatgtcttgactgctgtcgctcaagctgatgactttcaagtcttctactgcattttctctacatgaggctcctttattttcaaagaaaaaaaatgccctttatgtgggctatttctttttctgatcatttcccatcctattttcctatttctgtgtgtgtctagtatctttttttttttaccccctctctcaacatagcctcatttagtatttggcagttttgcagttgaggtaaccaatgcctcatcactccagaaatctcatattgtaaaatctttagaattaaaaaatccttatacaactgaagaaaatacaagagagtttcaatgacttgctcaagttcatacagacctccagtggccaaggcaagacttgaacccacctcttgtgaattcatatcccatcataggagacagatacacagcagctcccacagcaacattcaacaactggtagtggctctctacagcaccatgtgtgaataaatctgagactttgattgattaatgatgtctgccatgaatgggatgggtcagggagtagactagagagataactaagtggtgatgcatgtgccatgggttgcctttgccccagcacagcgtattgacagtgatgattcttgagtgtgactcgataattattttatttcaagggtttaaaaggtcagcctggggaccaatcacaaagtcagggttgagatcctatatatcacaaggctttgagactacctgaccaacatgggtttaattactaatcctgcaaagactaatatagttcctaacgttttatccatgttttattagtatgctgatgttgaatgttgggtgtgtgttgttggcgtcttcattttttttctgcaatcaaatatggctttctttctcctttggaagaaatgacgtaaggtgggtgaaattgggctatcacagtctcagcattatggacattggggatagctaattatttgttgtgggggctctcctctgatatttagcaacatccctgcctctatccactggaagtcactgacacctccctcttaacaccaggtctttaatcttgacaacaggaaatttctcccagacattgcagaatcccgcctgtatgagaaccactggcttaaactgatacatgttttcaatgggttgtaataagttttttaaaaggtaattttctctatggcccatttgtattgtgggcgttggaatagtgacagaaaagcatgaaggaaaacaaatgtttattatcttttgtaaggcagtgggaagcttttcttttctatagtactgaataggaaagccacaaatacagaagtacattttacaacaataggtggcacactactaccagaagcctagttcagaaagtagatggagacagttttataagtgaatgtatttcaatcgttttttattaacagtattcccaacttcttcattttatttctcttaaaaaagcatattctgctttaacagtccttctaaagctaattttatttttaaaaatgagcataaatttgccatttgctttgcaaaacaaacctgcaatcaatatagtatttataatagagatgtcatataattgtgggattaaaccagattaactttgatgtcaattattttttcaatgcattatagaaaaaggcatttttttaaagcttttctggaatattaggtgttctgtatgtattttttaaaacaagtaaatggatgtttagtctctattagtacttaagaaacactattataataaatatgacttctgttgaaaacaggtcatgagatatcaattgagggtagctgaaaatagggcagctcaatgccttcttttcttttaaaaactcttaaacttttaattatgatgcctcagtgtgtatttggagaagactgtaagttgaaatttaaagattataaccatggtgcttagagctagcataagagactagtttattacaaactccttttaataaactctctgcccatacattgaaaaaataaatgctctccgttttcttcctgtttgagtaaatagcacttccaatgttttaagtatgcagagcatgatcaaagaatgaggagatggagacaaaaagttgctgagtgaatatttttatttttgtagttgtgtctctgacttgtttaggagttgatttttttaagactttaagcaaaataaagcttaatctagtggagactctcaaaaggaatgatgtgtcactccttttcaaagtatatgtgctttaactatatagtaatgttttaaagcttttattaatgctggggttctttataatgagaataccattcattggtcatttattacaaacctattatatgttagatatgaaagaccttaggttattttctttctttaatccataaaatgatgggaattaggacattatatcccaaggaggattattaaatagttaatgtcacggtgttagtaagtcacagggctgagattcaaacccgggtctaattttgaattaccctttatctaaaatcatggaatatcaccacaagggaaaatcagagctgacatgaactttcttccccctatgcctctgtcccccttttgttccttcctttggctttggaaaaatttgtttaagcgaaattctatgagcccccaggacaattgacacaaggagagtttcttatttgagatcttggtttgatagtccatagtttttttttttttggtcattgttgtttgtttgttatttatgagcaaggaacttgagttacagaaaggcaagcaaatgacccccatattgaactgctggagaacttatgacctgaacccaagtcttaggagagactctttcaaaattacctttctgttggcctaattttaattaataaaatactgctgcccacaacatttaaactgtgtggtaattattgtttcttttcttgtttttcttccgcattacaacataaactctcccatctgctgtatatttatagcacttaatataatccatggcacatagatgctcagtaaaccagtgtttcattattctttcataagcaactgctcttgtgacatcctttattgtgatcaatagaatatatcatgtattaattatatttcctttataatttagtaaactctaggaaacactgagggattcctgtttgtacaccaatccataaaatcacgtgtgattgcttagtcctgttactaaagatgttgagacacagaagaggaaatattgtatgtacatttcagagtgaaaagtaattcctcagggttggatatgaaattgaaacagttgatagtaagagtgctgcactaagaagggaatccttcccctaaattttaatatgtcccctagtcatgctattccatcttaatgagaattgattttgtcctttcacctatcacagacccttacatgcttccttcccagcccgtgaaagccattgtttgatgagaaaaaaaatacatgacttttctccccaggcatagaaggataatagctgtgcttttttttgtttttgttccttttttttttttttttttttttttgagacgaagtctcgctttgttgcccaggctggagtgcactggcacaatcttggctcactgcaacctctgcctcccaggttcaaatgattatactgcctcagcctctggagtagatgggattacaggcacgcaccagcactcaccggctaatttttttgtatttttagtagagacagggtttctgcaggttggccagactggtctcgaactcctgacctcaagtgatccacccgcctcagcctcccaaagtgccgggattacaggtgtgagccactgcgcctagcccattttttaaaattaaagcttttcaggtaactgttgtttcacatgcagttgtataaaataatacagagaggtcccttttatacttttcccagggtgtgtgtgtattaagttctacacaattttatcactggtgtagattcatgtatccgtcaccacagtcaagattctgaataagtccagcaccacaggcagggttgccacagccaccccccttccctgtccccatctctgtccccaacccgggcaaccactaatttatcctgcatttctaaaactgtcatttcaagatgttgtataaaaggaatcatagagtaagtagctttttaggattggcttttttaattgtctggttttctggacaatcatccaaattgttgaagatatcaatcattggtttctttttattgccaatttttaaaaatatagaatgttactttaagaagatcgtttaggaagctgagcctgtattatgatagtttcagtcacacaaggtgtaaagggaggtcgtttgctatgattgttgttctccagagtctccaatgagtagctttttcttagtggggaaaaaaaaaattggcacagtcactgcttctcaaagcttttgtcaagctgggggccaaaaacaaaatcccacgaaggcattgatcaaagatatcattgtaggaggaagtcctagagggcagaaaatgctgtcttccttttgctgtcttgccacagttccctgttattagagtcctgtcctttgtcttcaaagctttggagaagtgcttcacataaaagacaatgaagcaggggccacctaagaggcttgtctttgttgttgtttatgcagaaagtactgttctctgctattggcaaagtaattttcagctctagatgagcccagatcagtcacaatagttttcacaagcctgataggaaggcctagagtggtgttaattagtcagagatgggagaaggaggacatgtgttagcatattcaatcaatgcagagtttcttcaactggcatgggggcattcctcagcagtcactgctacagtagggcacttaatgcatgccgatgcccgtgggtttgattgcactatttaaattttctgccatgcatcccaatggtggcgaaatactgctgttttagagatgcattatgagttgtgaaattagattgaaagaaccttatgggggcagaattaagatatgacacaagcagaggtgaaaatggtaaacatttgtgtgcaagttgtatcatcatgtaataatacaggggtctccaactccacggattggtaccggtccctggcctgttaggaactgggctgcacagctggaggtgagcagctatgagtgagctccgtctcctgtcatatcagtggtggcattagattctgacaggagcgcgaaccctgttgtgaactgctcatgccaggggtctagattccttgctccttaagagatgctaatgcctattggaaaaagtgtcttccacaaaaccaggctgtggtgcccaaaaggtgggggaccgctggtataatacatttattgaaacttttggaagttgtcatgtagtgtagtggcctcctttggccaaggaaccataactagtattaaagattatttctaatgtaggtattactcagacttttttttttttttttttgagatggaattccgctgttgttgcccaggctggagtgcaatggcgtgatcttggctcaccacaacctccacctctgcctcctgggttccagcaattgtcctgcctcagcctcccgagtagctgggattacaggcatgcaccaccacgcccagcacgcccactaattttgtattttcaatagagacggggtttctccatgttggtcaggatggtcttgagctcccaacctcaggtgatctgcccgcccaggcctcacaaagtgctgggattacaggtgtaagccaccgtgcccggcctgatgttactcagacttaaagagtagctgcatacagttccctttcactcttctggactttgttttccagacctgcttgtaaaaatctatttcagggagttctctcttgttttcttagtgtctgtctgatgtcagcctacttagtatatctgcaaagactcagagtggtttatcggaaggttccaagtccctcctactatgtgacattgggcatgacatttaactttgtggggtcttaattgcctcaagtataaaagcaaacgagcagatttcagtagatgatgcctaaactctcatctaggtttaacagtcaataaaatctatgagggcgaactgtaagacctggcacctttttctgaagagagattgattatgcagtgcagttgtcttgaatgcactgcacaaggatgtgcagacccaggaactgcttgtctaatgaaaggaaccagctgaatgtctctctgggctgccagtgcttagggcctgacccagacggggcttccccctctttgagcagtggattgtcttggactgagacagtgaaatctcctttcttcactcctcttctttaaggaggatcagtgtcatctgcctcacctgtatgccttccttggagatgttcatgagagcatttaggtggtgggtaggtatataggcatttgctctaaaattacttcaactttgttttatgtttgagcattttcatagtattagatagggaaaaaaaactagtggaaattgaattgcttaaactttgggagcaaggcaattagaatgtgtgcgtagctgcagatcccagtagcctagacttaattcctggccttctctcagatgtcaagtgtccacaggacaggaatttgtaatgggtgaaggatgccttcatttccccttgccttttctgcttatttgctatgcaaagcaattattccagattttcagtgtgggcctcaggagcccctgtgttaccttgggcaatatgactctgagttcctaagacagggctctgctccctgctgctccttgcaagccttgggtgacttcagtgtgttttccaggttgtcatagcattctgaacataccatttaagctggtcaaaggtaaggccacctttgaatgtgcagttcaaccttttcccactttccatagaaaagagacagttcagcaggttgagggaatgacctagtatgaacgtcagtgttgttctatgtatttagcagaactcttttaacaacatcaattctgaacaagttacccaaggttaagttcatgctggttgaggagaatagtgctggagccagatagctttgaggtccagccctggatcttatcctctcctaagttagggaattttacgcaagtcacttaacttgtgaatccacagctcttcacatttgtacaatggggagagtaaaaataccttacctacctcctgggttattaggagaacacagtcaaacaatcccttcaaaatcctctctttgaacctgtcatggataattctcaataaatgtcacctagggtaataagaattctccctgctgtataagtagaaccttttgtatcattttacccttatttacccaggatttctatatgtaccccaggagacacaagtgtcctaatatctcacagaaatgtcaagactttgtcttgtggcattgatctctaacgatgcccatgtatgataggtggataaggggacagtgcttctccttgtgtcccgatcgctgagtatggagaatcccgggcttctaattctctccaactgcaagcaaagtaacggaactgagcattcaaggattttgggagaattaaggcaaatcccagggggattaggaaaccagagtcatttggttgtcccttgatctttctttaataaacgatcaagttcagctttgcatggtgaactgaatttgtttcagctcttaattttttaccttgtagctataattctctggctgctgttgctgtctttaaatccggttcaccagccacctggagcattccaataacacaggcgttttaaggttttcacttcaacatctgtgctttggaaattgagaagagaccacaatttaggaatatgctgagaaggaggcatggaagaccaggggttccatctcctcgtaatgtgtggtatctgttctctcattcttcccagattgctccacaatgttcctctccccacttctatttaaatggtccaggggaagctctgtcatgatatttcaatgtctcaggaaggcccaccatgccagcatgccactgtcatggggtcacattcagtcattcattcccttgctcacgtgctcagagaccattttatgttttgcctgttcctaggctgcatgttcaagcacttggctgtgtttgggtttctggagactggaagtcatttttgctgattaatggggatgatggtatttttgtccaggagcaaactggggagttgctttaggtatgtggccaggagagaaatgccttggatatttgtggggttaatactgggcttattagaatgctgtcagtcactccttgctctcaactctagccacccatgccaaacccccacaacaatagtgacaacaacagcagtaataatagcagctaccagttagagagctacatgtgaggccttgtttgagcgtctcatttaattctccaaaaatcccacaaggaatgtgttgttattttttacttgttctagctgaggaaacgggatattagagttctgagtccaaagcatgtgtcttgtaaatggtgaagctaagatttgaactcagataaccttgacctagtacccaagtttgtaccaactgtgcatcattccctatcaccctaagctagggagtaggtcgaattaagggtactaccttcatatggatggcccgatacctggtcataatgaaatcattctttcttggccttggtctctccacctgccgacagggcaggtggcagcaagctgcttacaccacatgagcatgacagagcccctttgtcttctcattggccaagttcttcttcctctcttcataaataacttcagatttcctagcccactgctctagaaaatgtatttcctctgatggccacacagccggagcaaccccagaaggcctgtggtgttgtgctgctctttattttctgccagctgcatctgtactcttctagaaaatgctgagattcagcagttgctcaaaaggcactgacatctaattatcatcctataggctgttgccacaagtctgcatagtgaagtcaatgctgagacaggcttcctttgccagtcagaggggctctggcttgtttacagatagaatctttaactcctttgaagggccagcgtgaggatactgggaaggttcctgtgggacagttttataattgaaccagggaactcctctgtgcctgctcatatgtgatatggataagtcatgcagcaccggtcctcctgcatccaggaatgggctgacattgatctgttcactcttcagggatgctgtctcaactacttgcacaggtataattttattatattacgctgcatattaaatacctgcacttcccttttcccatcctgatacagatgatttcattttgcccacagtaacacatgcttctgtttgcacgtgaccatgatcattttctctacctctaggcttacagaagggccagaggtggtgctaatcaggaactggaaacttctgaccccactgtgcaggctggagtagggttgaggctgtggctgagaaccagaaggagaaagcaagggcaagtccccattctagaatacctggctaggatgtgggggagagaggtgagcatagctcctttctgtaaaaattacacttacacagagcttccctggctttggaactgtttgctcttttttttttttttttttttttttttttttttttttgagacggagtcttggtctgtcaccaggctggagtgcagtggtacggtatcagctcactgcaactttgcctccctagttcaagcgattctcctgcctccgcctctggagtagctgggactacaggcatgtgccaccacgcccagctaatttttgtatttttagtagagatggcatttcaccatgttggccaggatggtctcgatctcttgaactcgtgatccatccgccttggcctgccaaagtgctgggattacaggcatgtgacaccgcacccggccaaagtggttgcttttattctaacaacgtctgtgtttgcaacggaagagagaccacaggagtgctagagcctgagttcagggaagggtttgacaggagtttcaaggcttcttgttggcggggtagaacatcatccttccagccaggagtagctcttcatcagattgcccgggattggaaagggatcagtaccagatggcctcctggccccagaagttccttctggagcagaacagagttttcttgtcgctatgattcagcaacagcaggcattgatggcggccccactgggtgcctggcatggcatcataccccctgcctcccagaacctgcggccctcctccatggccaaggagcaattgcatgtggagccataccagcagcccccattgagctgacttggttgcctgaagtgagaatggttaaatgggtaattgatggaagcaaaaagccaagggaaggaggtacccgctgggtaactggttagtgtaagaggctatgtgtgtgtagctgaagttgatcaccattccaaggcgagtcttttcccctctcttctttccctcctttttatttaacaataataataactttattgattcattgctttttttgaggcatgcattaagcccttcacatttattaacttgaaaaaataggggagttgagggcccagaaaggtaaaatgaagtacccaaagtcacacattttagtgagtggcaaaaatgggatctcagggcatggttcctatctcttgacaatctaagctcttcaccctgtacctcttttccatctctgcagccctctctccctctcttctttatagatactctgagcgtttatcttgcatccagttagcaatgcagtttcagagatagaggacataggacgtcccttacggaactcaaaattgagtttgcagagacaaccttaacctttgtaaggtgagggaagcctagagtctcatgtggtgtgtggggcccagggatgcgtttgtaaagcttgggtgcagtggtctttcttccacagggagtctgagaccttggtctgcttacctttctctagggcacccagggcatgagaaggtggtggtgttccttataaccttggccatccagtagataaagttcaacaagtaggattggttcagtctgatacctgtagtcccctattttacataagcccctccccacattctcccttaaacacatgaagaagtgcagaggagaagggagagggcatgtcttgagacccagttatgtgaaggctgtggattgagagtttacagtgttagtgatctcttgtcatcctcacaacagctctatgcagtggaccctgttagatcttatatcacggaagaaaagctccaagatcagagtttcaggtatcttttctgtttcatctctgcttacaatcttctcacaatttcttgcctctctcagatttgattccgaaatccctgagtgctagaagaaaggcatcatatcatcttgtccctggttatctcattgagttcattttcctgccctctgccccctgcccccagctccctggcctctctgctgcctgatgcactgcgtccaacctgccttgagcctgggcattcaacactctgccttctttccctctgcctttccttgttcactttcccccttccaatctcttttcttcctccttttaaattttccttgtgtgagtttgattttaaaggttttgttgggcaaagtgaacacacttggcttatagaatcacccttagggtaatttgttacagaaaattctgtgtaatgggacagtttttttgtttgagtcagcacaaataaagcaaactctccagggttgtggtcaaatgctgtttcttacagttctcaaggtttctaagtccaggctctctagttctcatgttatttggaactcctttgggcattggtctttgtatctaaaatggtctcatgtttaattcaatgtgcgcatttataacaaggtctgatttgatgacttgttcagaagggtgttttttttttttgaagattttggtagaattgtatgattttctggtctttggactagtcacttctaataacttttttttggtgagtgagtctggtcttctccatagtttccacgcttcataaagcattaggaggacggcatttcacttgccgttccccatggtctaatctcctgctgattttattttaactctgagggatttgctattggtccagctttaccatcagttgcatctccatcaatgaggctgacctggagggactggattcaaatagggagcagcatccagttccctctacctagagattgccaacttctctgaagcatttccatgaaatttataatttaatttctattttggctcaagagcatcttggtacaaatccttgggtgtggccctcttttgtaagaagtacagaatgaaagaccatcttgcctgcaaactgtgtgcagatctttgtgagaaataaagtcatgtttcattattttggctgcatgacttaaaaaatgtcatgacccagaatgaatattgcttttcagtcaggtggttgcacgtttcaagatggctccagtggcttctgaaatgtgtttaccctgcgaacattccaaagttgtctgtgctttgtccagaatccctggatgccattcattaaccctcccctcccctcccctcccctcccttcacctctttgtctgacagagtcttactctgtcacccaggcgggagtgcagtggtgcattcatggcttactgcagcctcaacctcctgggcttaactgatcttcccccctcagcctcccgagtatctgggaccgtaggtgcacgccaccctgcctggctaattttttgttttgttttgttttgttttgttttgttttgcagagatgaggttttcccatgtttcccaggctggtctcaaccttctgggcttaagcgatccacccgcctaagtctcccaaactgttgggatcacaagtgtgagccactgcacctggtcctgggtgccattcttgactacgtcacctaaatgctccttcttgtgattcgactctcatcctatatacctagtgccaccatgaccccatcaccctacgtcccctcccccttcgacttgtcctcatcactgcatattgagctttcacttggcaaagtcttcacctcccagtaccatcaccttggggcttaagtttcaagatatgaattgtgggaggacacaaacatttagtctatagtggtatgaaatgcccagcattattgtttctgtgaccttaggacaaaagggtacatagatgctattgcataaaatattatgtttcctagcttttctgttggggaactatataaaaataagttttggtacataacatactttcctgatgctaatatttccattgtcaactaggaaaaattattctttttttttttttttggagacggagtctcactctgttgcccaggagtgcaatggtatgatctcagctccagtgcagcctccacctcctgggttcaagcaattctcctgcctcagcctcccgagtagctgggactacaggcatgaactaccacacctagcttttttttttttttttttttttttttgtatttttagtagagatggattttttttttttttttgtatttttagtagagatggattttttttttttttttttaaccatgttggccaggctggcctcgaactcctgagctcaggtgatccacccacctcagcctcccaaagtgctgggattacaggcatgagccatcgcacccattgttgggtaggaaaagtaatgattacctcccagttttgagcatcaattggtaacaaaatctgtgtaagtgttgtctgtataaatggtaaagttctattgaaatgttgaataaaatagaggcattcatagtaataataactgcgtcatactaggcttctttctatgaaataaattaggtcatttactaaaagctcaattaatgaatattactaagaaattttcagaaatcactgcttagaaatcagcaacggggtagagtgagttacttacagatgaatattcgaatcaggggtttcaggaaaaactgatgagaattgtttgtttagactgtcagtctctctgtgcctcagtttcttttttctagaatgaaggggcaatcaccagagtgtcttgaaggtcccattcagtattccattttccctacattccctgttatgttatgttatgttatgttgtgttgtgttgtgttgtgttgtgttgtgttgtgttatgttatgttatgttatgttatgttatgttatgttatgttatgttatgttatgttatgttatgttaatgttatattttaagacagggtcttggtctgtcacccaggctggagtgcagtggcacagtcacaactcactgcagcctcaacctcctgggctcaggtgttcattctgcctcagcctcccaagtagatgggaccaaggcacatgtcaccacatctagctaattaaaaaaaatttttttttggagagatggggtcttactggtctcaagcaatcctcccaccttggcttctcaacatgctgggattataggcatgagctaccacacccggccccttttactgtttaaaagcataaaactgctgactctccctgagtgtttgattctaataggaaaaagttcatcctctgggccctgttggatcatggttgatgtagtatgacaaaatctgtagtagcttccatgaaaagaggaaagttttgttgatgtgaagatttgtttctctttagttttatattttagaactcatcttgggttccacttccctttgatttgggggttgtagctttggtagtcagggaagcaggacctggaaatcacaaggccttttggaattgcagctcccaggcaacacggcctgcttgccttcccttttgaaggagatcagttgctccctctctctttcttagtgtttctcagcaagactatttaacatttaaggccgtaggcattaagaatccagggatctgtgttttagagctgaatgtccttctccaagccaagctcagagccaaagctctcaacagctgaaatacctgcttgctctattctttttaaccagtgcagcagtgcttccttctaggataacagagctcttctcatatattccattgactgttgaaatctcagtaagggaaacacttttcaaaatgtcttgttatggaaaggattgggccaaataaatatatttcctgttgaaagtaacgtgtactttcactgaaggatagcttctctactacagctactgtttgaaagacaataagaatgttgattctggccaggtgcagcgttgggcacctggagttctggcaactcaggaggctgaggcaggggatcacttgagtgtgctgtgattacacctgtgaatagtcacttcactccagtctgggcaacatagtgagaaccagcctcttcaaaaatgaaaaggagaaagaacgttggttctggagtcagaatgaattggttctagtgtttggctcttaggctcagtaacttgtgatcttggacaagttacttattttgtctggccgaactccaaattccccatctgtaaagtgggaatcataactctgagaatggcttgccgatgcaataagatgagataggtagtgcttgtgttgcctgaccctgagtaagtgctcactcaatattaatcacaattttttttttcatgaccatttgtacagtgtattgtcatgtatatggaaagggtttcagttctgttttagggatttctcttagaaatctccagcaatttcacttagggagcttttgaagccatctgccttagtgagctgtgctagtgtgctctttttgaaaggtaagcaatctttgggccagtttggatatgactcttttacatgtccagtccatatattcccagaagaatccagaagtcatggccatcaaagtaaaatacccagccttttaaaaccactacatttggataggaagatgctctccttgaaattaccttttacctttgagatccatctagaaaaaaatctaaagagttgattgtgggtcaggcccatcagagtgtaagaatgaattcgagctgtaaaaaatgtgattctttttctttttttttgaagagccattgggcaggagtaaattggtagaaccattttggggagctgtatatattcagtaaagttgaagatttctatgctgttaggatcaggtaatttcatttgtaatttagagaaattttgatacatgtaacctgggtgacatgtacaagaatatttgtaacagcagtttgtaagcggaaaactggctacagcctcaatgacattcaccaggcagtaggtgaatttgatgttgtttattcataccttgggagaccatgcaactgctaaaatgaatgaataggaccagcagatcagtgtggatacatttttagctttactcataagatgtcatatcttaaaacatctgatacagaaatagaaaaatatgaaatcatattttaaatatagtagcaaaaaaatatagacatagcaaaatacggaatcttattttaactatagtagtgactgtatggctgttgattctgttgtttctgggcatttgcagcatttcttacttttagatagctgtcggaaaagaaaaatactataggatgggttatgggttgcctttggcatttatttttaatgttatacaatattgtatttttgaggaaaataaattggtaatgtgtggaattgggtaactggggggaggggtagtttttgtccactgtattctctgcttattttttatttactttttaccattggctctctggtataagaaaaactgaatgatgattaagttcagttgacgcagtataaatgattagctaagtgatcagggctctgaggctgcctttctgggtttatgtcccagctctcattcttactggctgtgagataggaggcaagagactcaacctcctcctgccctgttgcttcccctttaaaattgttcagtagagcagtgaggattgaattggattattcctgttgattcaagtactggacagtgtttgacacagaataaatgttagctgtttttgtattattatagtttgatatggaagaaggaactgtaaaatgcagttaattatgggatcctggtaaaagacactcaaatcagactctcaggggcacaagaatccagagtgcatcccattgagcctgcaccatttcctcgatcctcaccttatctttccaggttgagccctccccagacagtataatcagcatgcactacccctgttttctttctcttttgtaccttgagactttagggtggcctaaaagcatttgctggatcccctcaacctcctttgggaggctcatgctctcatggttgaccacgtcttaccaaatatgtttatcctcacaatttatctagccaatgcaaatgtcttttcagtggagatgataaattgggtatttaaaggcaccaggataatttcaaatttgtgacttccactggaatggggtacattttaaagcagagaggtaaatgtctttcttttcacttaaatacccaccattcctttttctttcttccttttttttttctacacataaacacagatactcaaccactttaaattcgtagaaattgatctaggacagaggtggttgattcccagccaggaatgggtctccttctccctggaaatatttggcaatgtttgaaggcaattttgattgttaggctttgggacagggggagtgtgctgttaacatttagtgggaggagtccagggacgccataaacataaagcacaggacagtcctccacaacaaagaatgatctagcccaaaatattaacagagctgaggatgagacgccctgccctaatttaatgagagagatgtaagtccatacccgtaactgaattcccagacttcttcaccatggcattgctccagcgttgagtaaatctggcatcacaaaatttgtcttatgtagagctggagacaaagcagggaagaagagaagcaaacctgttaagtcccacgtagtctacaactccatcaggtatatgggatgagcaggaacagaaagctgttttctttagaaattctcactcttctctttcctctgccgcgagctcttatctaaagaagggagattcagagtggataaagatctcaggaaatcttttgctctagcttttgatccctcttctcagtttcttctcttttcagtgtgtagaagtcatatgtcaaagcacagacctgtttagaatatcaagagtgttaatagaggcttcagccttcttttaggccacattctggttctgcaactgacacttgaggaggtatttcctgttgataccattcaaggagctgtttcaggagggccctggtgctgcctggggatggtgttctaagtacttgattccatctgcaaggcaaaacgttttgagagagagaggattctcttttaaaggaatcataatgtttttaatgttaattatacaggctactcgattaatcagttaagtgccatccttatacagaagggaaactgggaagtgtttcaaaatgaagagtacctagcggcttgaaagagatgtttgctctatatttatattttgggacttgggtaactgacgattcagacatctatcagatggagggctgtctgcttggagtcatgcctcagctatacacacacatgcacatgcgcacacacacacggcacacacacacacagcacacactttataggccgtcttcatgcctttgccgaggtctttctgttccttttaagagtgccatcatttctcgcagagatgtaactggagaacaaagcttgcagaggcagttggatatatattctttttactcccaccttctgcctggaatgaagatgaggtataggctgcactccgtttcatttttgacccactttgataagaatccaaggtgagggacccaactgggcctcactggtttcccactggggaaaccttataactgaaatctagtctctacttttgaaaatcttagtcatgattgactaaaggcagtctttctttaaataaataaataaataaaagcacattacaaataaagccttcaagatttgagcatttggtagcccaatatcagtcagtgaaagaagtgtttacaattaaaagtagtaattagaagggacatgacatgatttctgtagtattcttgacaaaaatgcataactgtactccagtcctgggatgacatcatacaccttcagattgagggatattctacagtaagtgatctgtactcctttgtcaagatcatgagagacaggagactgaagaactttttatagattggggagggctaaggagaaataacagctaaatgtaatgtgggatcctggataagatgctggaattgaaaaaggacattaagggaaaatctagtacaattcaaataagatttttcattcagttgatgagttaattctgtcacgctcgtgtcaatttcctggttttgatcattgtactgtggctgtgggccacagtcaacatttggggaagctgggtcagggatatattctttgtactgttttagcagcaacttctctataaatctaaacttctctcaatacaaacttatttttttaaaaagtaataattagtatgcataacaaaactaggttaaacaatttcttttccgggctgggcgtggtggctcacatctgtaatcccagcactttgggaggccgaggcgggcggatcccctgaagtcgggagtttgagaccagcctggccaacatggtgaaaccctgtctctaatacaaaaaggtataagcccttctattaatataactagcttcctcctccttccccactaccacttaatagtaattcatgtttttttcccaatatatatacttctgcctaatatcatttatctgcctaaaatattacatttttagaatttgtcataatgtatttacttaacttaagtagtctgtaacagagtgaggtcataaagtgttgaacattctcgttcttgtggttctccctttattccttttttttttgacattaagaaataccgcctgtaattcaggcttacatttttgtgtcaggaggatttgaggtctttgccttgtgcaatctttgcattcctttttaattcttttgtttctaaagtgtagcactccagacattaaatatctgggtctaaatataagaatattttgcattttaatttgcagggaagaaaaattatattttaaagtccacagtttctggcttttatttacatattttggactactttggttatgcagggagcacagaaacatgccttagcatttggatatttattattttctaagtattaagaacgtggatgttctgcagcattggagagatgtttgagaatgctggcctggcctggccctcagaagttaatttagggtttttaactctggtgcaaatgcttaggttaccggcagggggttaataagtaaaccacagagaagccacaaaggtgcctacatgtggttgttgtgtagtttatcattagaccagaaagcgggggaaacagctgaccaaccaattcacagaaatttatcataattgagtggttaatgcaagcatactaaacagattaaatctcaatagtttttgtgtataccctggtagaaaaagtagtaactgcttacttgcacatcggaaacatgctcatgggatgttaacgtgtttgcatgcagaagcttatgatgcaatgagactgaaataatgaaaatgatgacagtaaaaaggagaaaatgtaaaatgcatgctagttggtaaaagaaaaaagtcttctctttgcttccaaggtatttaaactctgaacaaactgtgtgtgttgtggaatatattgggttagcgacctttcagaattaggaagaagaagttgtatttttgaatatagaaggccagcataattactcagagtacagtaaatgtccctatcattctttgagtttaatcttaacataattagctcctcgcacaatagagtgtttaatttgaaatgctgccaaggctcattaagtgagagaagtacttcctgagatctctgttgttaaatttgggattttttgtatgagataattttctcaagaagtgttagggtatcagaattgttgttcatattctgacatttatcacccaaactcactgaaacacttaacattttctgttttattgatggagccttttattaatattggggaatttgctatgtcacatggaaagaaattaatttccgaagtcttgacaagcgttctgagtgataggtccatttgccctgctgtgccttccccacacaatagcgatagtaaatatgagctggaaggatttatatgagctggtaggatttaattcttctatctcttcttttgggttctgtttgattattgatttctgagtcaggataagcaatacaaaatgtgaacaccagtgttttgttgttgttgtttgtttttagtttgcatttctattttggcttgacttgacatctccccaggttgtttttggtttgtttttgtttttcattaagacaggtagggtatcgctctgtcacccaggttgcagtgtagtggcaggatcagggctcactgtagcctcaacctcctaggctcaagccatcctcctgcctctgtctcccaagtaactgggactacaggcgtgtgctaccatgcctggctaagcttattttatttttttatctttagtagagatgaggtcttactatgttgcccgggttggtctcgaactcctgggctcaagccatcctacctcctctgcctcccaaagtgcttgcattacaggcataagccactgtgcctggcccccaggtgtataaaacacaatagaaccgtcctatatttttggaatgagagtacagaatattttaatatgctttgatagtttattacatgtatcaactgacatggttttactagtaaggcgtcttattttataagatcactaacctgtgcatactagaattccttggtctttgtaagtacttctatatattaacaggaggtaaatctaatcgagtataaaaaactgaaaagtaatgattattaagaaccaatataaatttactaggaacaaatcctgtgacattaaccccatttccttttttgataagtaatgaaccaaaggtgtaaaaattgctcagaaaagtcattggacagtgtgagctgcaggactataatgctgttcactttacatggtgatcagacaccctgagtgttgattaccaaggcaataaaaacctagagagacagatttcttgctatgcttctaggctgtgtttttctctgcgtcctcacgatcagctcatactgcaatattagagcagttttaagtcttctgatataggaacatgggagtcttttcccatttatcgaggtcttcttttctttctttctacggttttctgtagttttcagtgtataattcttgtattttgggggataaacttattcctaaatattttattctttttgattttttttaaacgaaattgttttcttaatctcatttttaggttaaatgagattaatccaaaaactgaattttattcagtcatatgttacttaatgacagggatatgttctgacactttgctcaattagtttattggatctaatagttgtttagtagattttaaataatttctatatacaagagcatgtcatctgtgagcagaggtggttttaattcttcctttgcaatctatatgccttttattttttcttgcctaattgctgtaactagaacctccagtgcagtgttgaatagaatagtgagagtggacattcttgctttcctaatggattttagggtttatatccttctactatctgtatgtatatttttatcctagctcagctccgtatggtgctttgtataagcctttacgttataatgaaacaaatcaaaattccttttacaactgagaatgtcaaaaactgaaccaaggattgtcttcactacagcctatggtttttcacatgaagtattcacttcaaaaatgacctagtgatggttcctttgacaggtccctttgtatgcagctttactgcattctgtcatgagacagcaccactagtttttgattccagtaatacaatgtcacatctggcagggatttttaaattcatctgtttatcacatatttattgagtgcttatcaaataccaggcataattgatgttctggggaaataacagttaataagaaacttagagtcttgctagaggctgacagattaagaaattgacaaatgtaaaatttttagactatctccccactgctaccttttctagaatttgtattttagaatacatttagcaacggaccggccgtgcacaatggctcatgccgcacacaatggctcatcccagaacttcgggagaccaaggcaagtggattgcttgagctcaggagtttgagatcagcctggccaacagggtgaaaccccatctctacaaaaaatacaaaaattagctgggtgtgttggtgtaggcctgtggtcccagctacttgttgggggcgctgaggaaggaggattgcttgagcttggaaagtcgaagctgcagtcagctgtgtttgcgccactgcacctcagcttgggtgacaacgcgaaccctgtctcaaaaaaaaaaaaaaaaaaaaaagagagagacctatggccaggtgatgaggtatgaagccatttaatgcgaagaagagctaaaagaatgagaacgtgattgcatgaaatgtttagccagaaatcttgggatataggagaagagggggagacttgattgattaggttgtaaatatttgtcctatggaccacggtaacgtggattagcattcagagtagtaaccagtagtgggagttggagtcatagagtattgggtctctttatcccaggagatttccaatggggtcagtttctactgaccttttagagagaccatgctatgctgtcttttttttttttttttaattttaaattttgttatagcccctattaatcttcattccactcatttgttaccctcttggcattcttaatatcatttgtggccctgtccttatcattttacaagggttttttttttccagatataaaaatgtttaataaaatttaagcacatcaaatttaacatcatatacaaagaacagtactttataacaaagtgaggtttacaaggggcttgctctctaaaaacagccttcttctttcccgatagattgtaagtctgtgcttgtaaagtcatgattctctgtgagaagatgaattgtatgcatgactgttttactattggttactactgcatctatcaacttggggagaaatgtattagagacaaaataaaatggttttaatcttagagagaacaatggtggtggtaacatctgccttgccagcctcccaggtagaatcccaggtggtgagtcagacgactgtgagtttacaaatatgcaacacagcagcaatcgatgaaccttcatgatgtgctggacgctgtttagggacccaaatagaccatttcaccgtcactgcatgcagatctgaaagctcctgttttctaaaggaggtttttctagccatttgggttttccatgagcaagttagtaatacagtgaatgtgataaaagcttctatgaagttgactagatttattttaggtaaagaacactttcctcaaatacatttacacaacttccttcctctcctctccctcctatatatagaaatgaagagagaaccttagcccagatacctatcctcttggcttccttttcattgtcttagatggtgcctgatgagcctcttcagaaccattggacacagttggaaaatcacaggctctgatatactttgtagatctgtattcctccataatagtgtttcccaacctcaacactattgacattttggttcccctgacagtcctgcccaactctttcagttccagtcatcatgtatataactagacccgtgtatagcagagctactgcttttcctcatggagtctcatgctgggggtaagagcttatgcgaagggagttctacatttgattgactcctagttacatgccattacaactgacagtatacccccttttaaagaaaatacatgtcaagtctttcatcttctgagaacaaaaactgtgaacaactttctgaatgggaaaatcactgggcattttgaaatatagttaaagagtattggggtaacttataaatggtgggtcagtcaactgcgtgtgttgtttacacaattccagtgactagttgggaagttgtttcctctgaaaagggacttgctcagctggaattgcttgctaaaaggctaggtttgttaaatagatttgtactctgttttgggaagccaaaatgtccctgaaactatactgttctgagatgacacagtttgaaattaggtgaaagcatttactatggagttgctcttaattaaatttgaaagatgagtcattgatcttggagatgatgatttgtcataattctatcttggtggcagagttagtatgaggtactaagggcttttatttaagctgtgtgccatctcacttatttgtgtttttctacaaaagtcctgcatacttccatgaatgtcaaaagtgatgtcttagaattacatatctaaataccttgcacatcatgctagttggcctcttaattcagagtattcgtctctggatttgaatccctgtgccactgcttgttcacctgtctgtctttcccattggattgagtagtccagagtacatgtttttgtttgtttctgtatcatacgtgtttctaaaaagactagacccacaggaggtatttgctgattaaatgggtgccccattctcctctgttcttcttctaaaatctccttcagtattcagccttcattttccatttcctctgctgccatctcaggcctctgccatcttggctggggattctactagatgcttaatggttaccccagtgccactcttctccttagcagacagagctcactttgcaaccttcaacccctgtgttcaaaacttctcattatggctggtgacatgcacagatggtcaccaacagctcaatactgtggcatttcgcacaggtgaggtgttcaagctgggcctccagggtgtctgtccttggggactttttccttttatctttaattatcattgtaaaggtttatctttacaatgtaacttgaagaagcttagaataatgatgaaaaaattatttgctgaacaccatgcactgtcttctgaccaaaccacccctccacttatggtcttattaatacatcaggtcctttgtcacctgtgtactggggaggctcctgatgttccttgtttctgtgtgcccttccctgtggttctccacctggggtctaacggtgcaaaagtcctgtcctccagaaacttttcctggattgttccaggaggaataacttctcctgctaggatgtcctttaaaaatacctgtaaagtaagagtccttatttagtaattcaaaactcctctcgttccagaaaaggaattaaaatagcttacaggaatatgtaagagtcaataagaattccatggggacaaaaaaatagtgtctgtgtgttaggatataaaacagggccagaaatgagattaatataaaaatacatatcatgaagtttgagataccttttatgggttgaaatagttaccttgtcaaagtcgctctttttttggaaggcagggtggagtggggccaggtctcactctgtcacccaggctggtagtgcagtggcacaatcacagcgcactgtagcccctacctctcaggcttaagcaatcctccccaccccagcctctcaagtagttgagactataggcatgtaccagcatacctagctaatttctgtttttgttttttgtagagacagggtcttaccatgttgctcaggctgttcttgaactcctggcctcaagcaatcctgccaccttggccttccgaagtgttgggattacaggtgtacaacattcttagttgtatgcttgttttctttgcttacaagcttttggtggtttaaaatggcagaagacattggacaatccatgacatacttaggacatttatagtcacctctttcttcttgactctgctaaattgttttgggagttttacattttttctcctgagccgtttctttatccccctttcgaaacctagctgtatggttgctaaattgataattatgttactccaatcaaatgctgtaagtggcagaatagtgatttagtaattgggttaaagttagtgtgcttcactttaatatgaaggcacatggtataccagctcggtgaaatgaatattaagattataaggttatctgagcatatgttgggtcagccctcagggaattgagtctggtggggaagatagcaaaagttatataaacaaacaaatgcattaaatgattagaaattgtgtcaagtcatgtggaggaaagttttgatagagttgacctgcctagaagaaaagactatggaagttcttttcaagattgcatttaaggtgaatcaagaaaagtgagaagatacaaggttttgcttgttttcgtaggatgttgtccttggtggaggaccagtttacacagagacttccgggctggcaatggtttgatgtgttcagaaaggtgaagaatgtccacataattggaatgatactttaacttttcttctttggaaaagttgaaattctctttaagggcatgaagtttatttacctttcaagggcctcgtctcttcttgatttgaaaaagcaggtacaaggctacattgtggttcaagttttccacttgccattactactaaactctaaggggagtgatcttcaaattggattcctgacagatttaaaattcccctagcaaaagaaaaccccaggggaaaaacatggttaaagctaaggaaagtgggatgcctcaggtttaatcagagtacctgttctcctgcccagagtcgcttacagatctgtcctgcgtgtgcatttggtaaataatcttgatgtgtggtgtttgctttcattgtcggctgtagtaaaatgtcatttattgcaccctgccaatttgaaaatcgtgctcttttatgaaaatacaagtagatgaggtgtagaggtgaggtttttgctgtcttttcactcaatttgtaaatttcatagatcatataacggtaaactatgacagtttgcttagaagcagacactgggcaaaatgtattctgaattttgactgcagatctctattctgctgtttgtttcaaaaaaccacctgtgtggatttcttttttactactgtagaatatttggaaaatatgctgaagattacagaggcaaaaatgattatccatacttctgcccccaagagctagccactgtcggtgttttttttttaatttcttttcctatttgtacatatgcacattaattcacgtgaggactcgtgtatgtgcagtcttgctatcctacttcgttgttatcctctcacatttaaccccaatatgtttacaccaattgcaataaaggccagatgttaaaggtcaaacaatccattttatcaatggtaatgctatattggacaacacagtttggatctaccaatacagtggagcatttatagactcactcttttccttctctcctctcctctcctctcctctcctctcctctcctctcctctctcgacagggtcttgctctgtcacccagactacagtgcagtggcactatcgtagctctctagggacttgaactcctggactcaagtgcagttcccgcctcagcttgagtaactgggactataggcatgtgtcacctcacctttcaccacctttttgttgggtctaaatcttgggacctgtttaatacagagctggggtaggtagggtagattcttattcagccagctacactgatagtcattttcttacacttctggtgccttcagaatggaccacaggtagatggaagacaccacatgcacacacagggagagagggaaaccctggacactgacccaggacaactcgagcaccaccccctgacatgtcatgtactacttggagaaagagagaggagaacctatcatggaaaagttatcccacagtttagataacttggaagataacttcgctattcctgctcgatccttccttccaatttcaaatcagaagaactgtcttccttctgaggaagaaaagtgggtaagtggattcaggtggagaaattataaccataaccctcctcttataggagatggaggttaaaactgttactttttatggctacttgaggagacacacaaaagtaaacctttctgcattgagttttcaagtctcaatgactacctagtagttcatttacttacctatatttgtatattcctctttttgtagagagtatttttgaatattttggtttgagatcatggggaaatcgttgcactgatcagtgactaggagtcagtaagatagtgttgaaggatattgatgtctgatgttggatggtctacaacttgtcctgtatgccttccccgccctgccccttgccacctccactgctgttaggatctgcagaagtcaaaggtggaaagacagaaagcttcaatcaggaagatggggagttaacaggtagggctgtttgatgcaagacatattgctgggtatgtacctcctagctacccatggccccaaactattttgaactacattaactagcttttccattttctgtttctttccaaatttgtgttttatagataatcttcttccaaatagaaggtttttattttctgcttaattgggtgtaaacagttgattacatgtttgcttcatagactctctgtatcctggaatttttctgctgttagagaattgatcagaagaggactggactttttttttttttaagtgaagctttgattagggacgaggtcaaacagcgcacagtgttcatggacgatcaagcaaaccagtgaagcatcttgtgtgcgctactaatatcttgtgtgcgccactagtaagaggaaacatctcttattttctgattgttttccacttaagcattatctcggaaaactatttttaaagtataaccatagcatgcatatatatatatatatatatatatatatatatatatatatatatatatttttaatgccatcatcaaacactcatttcagcctggtaagacaatttcagcccttggtgaggagagaaggaaagttgaaaaagaaaattcacaggacgatactctgctgtgatttctaagcccctggcaatcatttctttgctctaactaagagccattaaaccagttctaacaagagctctagacatagtgaaaaacacatgctaagaataaagagtccagcaaaactttgaagattttctcacttagagatttcccagtgtactgtttacaaacatgtccccagtcttgaagtgtattcagatttctttaggctaggaaaacaaaacaaaaaaccaaaccaaatgcagacacacaccagaaaggaagttcctttaccaattcatgaaattctgggaactttttatgtgagctgctatttaaccttttgattgctgtgtggtagttttggacagtaatcacattacgtggtttgactactgttgttttgcaaattctatgccatatattaccagaccttgattatggatgatggctttcagtaagttaaaaaaaaaaaaaggctgatggttaaatcatccatatttatttagggcaaaaatgaagacctcagagtatctttgcatatattctttattcttaaagaaaaattaatacaccactcatctatattgctgaggtcacattcctggaaatgcaaagatattagaggaacattacttaaaatctaatttttcacagggacaacgttatagattcagtcagagagctctggagaataccaaaatggattaaagtaagtccaagtaaaaaaaccaaaaaacaacaaacatagagccaaagtcaaagacacagaaggcgctaaaataggtattatgtgatggtgaatcacgtcttcctctatactgtgaagaggttttggagtacctttgtattattttataatttcaaacttagagaaaagttgaaagaaaagtacaaaaaccgtctgtatacttttgatctagtttcactaatttttaaatctttgtgtgtgtgtgtgtgtgtgtgtctgtctgtccgtctgtgtgtatttattagtgaagttttagacgtattatgcccctttacttttaaataattttctatttctgttctaggaaaatgggttgttttttttgtttgtttgtttgttgtttttgagaggggctcttcctctgtcgcccaggctggagtgcagtggtgcaatctaggctcactgcaagctccacctcccgggttcacgccattttcctgcctcagcctcccgagtagctgggactggcccctgccactatgcgcggctaatttttttgtatttttagtagagacggggtttcaccgtgttagccaggatggtctcgatctcctgaccttgcgatccgcccgccttggcctctcaaagtgctgggattacacgcttgagccacagtacccagccaaaaaaaggtattttcttacataacaaaagtatagttatctgaattgaggagttcagtgttggtatgattttattctctcaatccttattctaagtttcaatctcagcctttgtctctttgttcctattataggagatttcttcccaagccagatcatacattgcattttgttgtcatgtctttttagtctctcttaatctggaactgttcctgagtctgtctttgaatcttatgaaattgacattttgaagagtatatggcagttattttgcagaatgtctctcaaattaggtttccctgatacttctttgtgatttgatttgggtcatgcaggaataattattagtgatattgtgtttttctcagtgcatatcaggaggcagtggatgccagtttataaaatttctcaactgtaaagctaataatgttttctcaagttaaagtgacttgtaagatgatactttgaatctgtgtaaataccatatttttcatcgaacctttacccattaacttgaatatactttgataattgttgctattactattatggttgccaagtggtggttttctaactctgtgatttctatatatgtatttctgtacctttgttgtcattctactggaaagaagcactttatttcctcctctagttatttattcgtttgactttatcattggggctcatgtattcttgccttattcggtgggttataatatattactattgttattttgctgttcaaattgattgtcccagatttggcgagtgtgctctcttcaagctgatcattgtgttatatatccatgaccctaacttgtacatgtctaacttgattagcaaagttaaattttaacatgatagtgacatgtttacatactcagtaatgtgaaaacttagccattaaagtgttgccgtgttatctccgttagtatttttatgttgcccatatgaaaagctgttgttattatttctggtttgtatgcttgagtcgttagctcatttgaacattacagtctacttaaagctaatttacattgttttaaaatggaatcttcctgtaggtggatggtttttaaggagggatggcatcacactcttccccagaaatcaatcatgccttcttaaactatttccatcctaaactgcagatgtgatttagtgtgtattttcttcttgttattttaatgtttagcttatttcccttgtcagttctggagaaggccaatattcgtaatctggatttaattaaaaacaccaacttataatacagagacatacctgcaaacaagaatgtcagagaaacggatgatggggggcattctctctgaaacacatggaattattttagcaagtattctgttaaggggcctccaaatcaagagattttgcacataactattctcatactttttgtacgaagatattttaagtttttcccacttaagcttttctgcagagtatatgaggacagctgttgcattctttttagtaacaaagtgtgattcattttgcagtctgaaggtcagacttgaaactcaattattatccttaaagtatttattagatggaaaattatccatagcttagtatttaaggttaactgaatggccagatttaactaaagtaacaatttagtgaaggatgttgtcattcattctttggttctccttttctgtgaatgtatcttagtctgtttgattaaccaagcgcagcactttgctgtgcaaggcgatggtcagtggaagtatttatgggttttgggcgggtttcttgttctttgttttttttttgtttttttttttttttagggtcaggttttttcaattttcctttcaggtcctaactcagtaactccatagtctttgagcaaagatgcctggaagctttggcaacaacaaaagaacaaacattccttgaagcagctatttttataataatgttaatattttaacaggtattttactaccttctatccatttttgttctaaacatgcagtgacttgaaataatttccacctccaactgctgaatttgagaaagagttttcagtgtaaaaattgacttttaaaaaaagtctaaacccaacttgagccctactccagccttcaggtttgaaatccatgtcagtgcttgtcatttgagagcatgagtcctttctacctgccattcagcttttgaaaggagacattgcttatgtaagtgtgagagaatgcgaagcattctacaaataatgttttgttactttacatccatatgaaaagatagctctttgttttataattagtaagtacttttgccaactttgatgagtttaatattacattttattcttgaaaatttgatgtttttacggatagcaacttttttttccagatatatatgttgcatgtttaaaaattttttaaggctggttgcggtggctcatgcctgtaatcccagcaccttgggaggctgaggtgggtggatcacgaggtcaagagtttgagaccagcctggctaacatagcaaaaccccatctctactaaaaatacaaaatttagccaggcgttgtggcatgcgcctgtaatcccagctactcaggaggctgaggcaagagaatcacttgaatcagggaggcgtaccattgcactccagcctgggtgacagagcgagactccatctccaaaaaaaataaaaatacaaataaaaataaacttaatctcagtgacctttgtcatcctccatcctaccctgcgtttgatcccagctggcttgactctatcccttgaaagaccaattttctgaatcccctgaaagacaatgtggagattttctatgtgtaaaccatttaattttagtctgttcatggaaacacatctctacagatttaaaagaattgtttcattcatagccattttttggtgaatcaacctgagaatcacctaatgatggtgaacggagacagaattgaaagaatgaactttaaggtcaagaatgttgttacagatgcttaccctctggaaagcacatgaggtagctgagagcagtggagatcatcagaggctagttttaaactagaaaacgcattttaatctaaagagaggcaaagtgttttgtaagccattatacacaaagtacttcctgaaatatttttgatcctctatcatgggaaggctcagtttcttactgtaatgaagatagtctgtgtaagatgttcacctacttttgtgttgttccttgtggaaattagcattatgagaaaaatgtttgtgtgatttcactaagttttcttttctttttttttttcagtaaattaatacaaactgatatgcattttcagtaaataaatttaatctttaaaataattttatagctgcctttatgaaaataatagtgcaaatttactaactgctggtaatgtgctaggcactggaccattttgaagaaagatttttcattcagtcttcataatggctctgtgaagtagttaatactgttatctccattttacagatgggaaagtatatctcagagagagagagcttatggaacattctccaatccattcaactagttcaagtagtagaaactaggtttccagcccataccacgtgattttttgtttcttcttttgagacagagtcttgctttgttgcccaggctggagtgcagtggcacgatcctggcctactgtagcctcagcatcctgggctcaagtgatcttcctgcctcagtgtcctgtgtagctgcacaccacgatgcccagctaaccttttgattttttgtagggatagggtcttgctttgttgcctaggcacatctcaaactccttggctcaagtgatcctctcacttcagcctcccaaagcgctgggattacaggcatgagccaccatgtgatttcaatgctgaaataggtacctgggtcaggcgcggtggctcatgcctgtaattccagcactttgggagggagaggcgggtggatcacctgaggtcaggagtttgagaccagcctgaccaacatggagaaaccccttctttactaaaaatacaaaattagccgggtgtggtggaacgttcctgtaatcccagctactcaggaggctgaggcaggagaatcgcctgaacccgggagggggaggttgcagtgagccgagatcgtgtcattgcgctccagcctgagcaacaagagcaaaactctgtctcaaaaaaaaaaaaaagtacctgggtccctttaattgattattgatatgtatgtgtattaatgaatgaaataaaaattggggctcactttgttcagtttttaataagaccatcttaaggggttaggctggttaataactaaagagtagatacaatacagcataagaatcaaactcgattcaaaaccttcattcccagtttctaatgcagggatgtaacagatgttcttacatttagactgttatcttgatgggtggcacgtcattatcgtcgactgctgatgaggtgcagatgaatgctgctgggagccatgtgtgatagtggaggaagttctaattggagtgctctcagtacagaaaatttaagaatttatcaatgttttaggagatagcatattttgggaaagtcagtgtgtctgcaagctgctgaaagatgttcttgtagacttgttgaagaattatgaactgcaggatgccagtttttgaaatcccaattcctttggtaataagtataaaaatagccactataaattgagccccaggtactgttaaactaacttaattctcataagaaccccataaggtagtcaatgtcaatatctctttttagcattttgggcaaagtagatccagagtgattacccagagtgattgattattgactgtaggtggaagagcccattatctaccgttagctttggtagtcttaaccgctatggcgcagctgcctctgcagtttggatggctcatacaaaaatccacttgaggactgggtgatactttttttggtaagacaggttttctttcatctaatgaggtatgttttggagtctttatgtgaaacattttcttctaaaccatgattattaagggcaggagctacgtctgtgtgttcaccattttatcatcaggctttcagtggtgtataataaatatttgttgattggacttggattcttgagcgggggcatccagttggtatggttagggaacttttaagagaaacatttcgtttatgcaaacaactcttaaaggatgtatctttcaaacatttctttggtgctggtcaggtcacttactactgggctaataggagtggtggtttcctccttgttaaagttgtctgttacctgagagtatttgggactgatagagaagctggtggtgggggtgttatttgcagagaaagcagctggcactaagtttacaggctaattagaaatggtcacgcctctaatcccagcactgtgagaggctgaggtgggcagatcacttgaggtcaggagttcaagaccagtctggtcaacatggcaaaaccccgtctctactaaaaatgcaaaaatcagctgggtgtagtggtgcgtgcctgtaatcccagctactgggagctgaggcgaaagaattgcttgaacctggaaggtggaggctgcagtgagccaagattgtgccacttcactccagcccgggcaacagagcaagactctgtgtcaaaaaaaaaaaaaaaaaaaaaaaaaaaaaaaaaggtcagcttttatcttatctggtgctggaggagttggaaactatttaaaagagtaaccaaatttaatctgaaaaagatggtttactctgttggcagctgagaaataaaaagactggagtaaaaattggaaagagttcattagtaataacaaaacatttatttttgggatccatgctatggtttttgacagtcatctcttatttattttcatttttctaacagctcttagggtgaagaacagtcattaattcccctttacagataatagagacttactaaaggtaatcgcctaacttaatgtcacccagatattagatattaagtgtcaaaactgtgatttcaacttgggctttatggctccagcaatgaggctcttaaaacatggtcacaaagaaaaccttcttccttgggatgaatcagatttgagaagatcaagggagtaacagctacctttgcccttggagatcagatccacttagtagctctaagttattaatcttgcttttatttttttttttaattgtatgttagcgatccttttgttaaatgcaatgctagcatccctctctgtcaggagtttgaatctcagcaccattgatatttggggccccataagtctttgttgtaggagggtatcttgtacattgtggaatggttagcagtatctctgggccctctgcccccatagctgtgacaaccagtgtctccagatggacgtcgttaaacatcccctaggggcagaatggatccctgatgagaatcactcctcagcaggaagaagacagcagtaaattataaacaggtaagtgttctaacagggcttctgaaactcatgcgtatgagtcacttcatagcttgtcacagtggttttttcaagcattactctgacttagttggtctggctgggagccaagggatctggaaagtgattgatgcagggtgtttcttggaccgtacttttaggggaagtagccacaaagagctgaacctcacaccctttcatgtaaacttcctgcttagcaacagaatagagtaccttcatggttattaaaatgcttttctccttgtctttttattttttcttagatctgctggcctatcttgctagtgattaagtttacagttcagctaatcatttgctccaggtttccgagcttgtaaaatcgcatgctgtgcatataaatgtataggattttgaccttagaaactgaggagcaattatccacatgtcttaagacagagtaggccaccttttgactttgaaagtatcaccaggagggcattttatttttgaaagtcaagttttgtgtttcgaaatatgtttgttgggcttcttggtagcagtttaagttttattgtgattaggggctgaaacaagtgataaaaaatgaagtttcctatttagtgatgtgatgtcacctgttgctgcagatgagagttggttctctttaaaaatttgaaagtgataccatttatatttcaggattctcaccatgtaatttctctcttctggctatcaacctgcactttttaaatttaaatttttattcagattgtaggttcacatacagttgtaaaaaataatacagagatatcacttatatactttgcctagtttccccaaaggtagcattctggtaaaactatggtatatcacaggatattgatatggatatagtccactgatcttcttcagatttcctgattttaatttatacttattatgtgcattatgtaggtgtgtgcatgtgtgtataaattctatataattttgtcatttgcgtaggttcatgtatccactatcccagtcaagatactgaacagttccaataccataaggatccctcatgtttcccttttataaccacgcctacctcctccctcctcccatctctaactcctagaaacctctaatctgtcttcatttctaaagcttttgtcacttcaaaaatgttacataagtggaatcatacaatatttaatctttgcagattgcttttctttcacttggaataattctcgggaactcatccattttgtgtatatcagtgtttgttctgttttattgttgagtaatatgccaaggtgtagatgtgccacagtttaacctttcacttattgaaggatatctggactgattccagtttttggctattacagataaagctgctgggaacatgtgtgtacaggtttttctatgaacctacattttctatttctctggaattaataaccaagagtccaattgctgggttgtgtggtagttacgtatgcagttttatgagaaattggcaaatggttttccagagtggctgtaccattttgcattcctgtagcaacatatctctgcagccttggcaatttttgacattacaatttgatattgatattgatactgatttttaattttttactttagccttttggatcaccaatgtagtgatatctcattgtagtttgaatctgcatttacctaatgggtaatgatgttgaacaacttttcccatgcttatttgctatctgtatgtcgtctttggtgaactattcgtgtcttctgccgattctcttttctaattgtatttttttccttcttactattaaattttgagaggttttttttttaatatattctgaatactagtcctttgttgaatttgtggtgtgcaagtatttttcccagtctgtaacttgtgtgtttatcctgtgttattttgtctttatgagctttcttggcagaaaagtttttagtttttattaggctcagtttatcaaattttccttttatagatcatgctcttagtgttcaggtctaagaacactaagaatgtagggcttagccctacgttaccaagattctctcctatgtttttctgaaaattttatagttttacaattgaaatttaaatagatgatccattttgagttaatgtttgtatgaggtgtgaggtttaggctgatcttctctttttttttgcctaaggttttccagttactttggcaccatctgttgaaaagggtattcttccattaattttatatcttcatcaaaaatgagttgagcatatttgtttgagtctatttctgggttctctcttctgttccattgattgatgtccctatctctccaccaatatcacactgtcgtgattactatagctgtacagtaagtcaatatcaggtagaaagattcttctctctcgattgttctgtcaagatttttgtagccattctagggcctgtgctattctatagaagttttatagtcttgtggatgtctgcaaaaactttcctgggattttaataggaattgtattaatagtatagatcagtttggggagaactggcatttttactactttgagtctaggaacacactgtatctctccatttatttaggtttttgatttgttttcaatatcacattgtaatttttagcatacagatactgtacatgttttgtgtatacctacatattttctctagagtacagttataaatggtatttttgttccatttattccttttttagtatatagaaatgtgatggacttttcaggttgatcttttattctgtaaccttactgaactcactagttttaggaggttttttttcatggattccttggaattttccatatagacaagcctgtcatctgcaaacagagatagttttatttcttctttttttctttctgtatgactttacttctcttttatgccttattttagtggctagaactttcagtgctgtgttgaatacgagtagtgagagcacacatccttgccttgttcccaatcttagaaagaacacatttggtctttcatcattaagtatgctagctatacttacgttacaaatctctctgtaggtgttccttctgattctttggtaattcctcttagtgagacaaggtctcactatattgcccaggctggtcttgaactctggggctcaagaaatcctcccacctcagccttccaaagtgctgggattacaggtgtgagccaccatgcctggctgtatacatctttttaaacattgcacagaggtgctccggcctcattgtttgcccttatgctgctgcttttttctgtcttcctcttcttctgactttatccttgtttctcttattgtatctctagaggttatgctttagataatttgggcaagaaaagttgaagcaggttctattagatgatacatcagaatcatctgagttcatatttaaacctagcttttctggtttggcagttgaaataggcatgataggttacattgcgttgttttgcccaggcattacctctcctcattgtatgatttttgcaatggagtctcttttcttattgaataaagcatgtggcaaaggtctttaaatggaaagaaccttcttttgatggtctacttgctgttgaagtgaataaataaagaagaatgaagagccaaaagaggaattcaaaaagaaagaaaatgattctgttgattctggggtaagattaatctgacttgagccttggttctggaaataagtaacattgtgtccctggacaacttgctcaatcccttgttatttatttgtctgtctgtctgtttagagacagggcttcactctgtcacccaggctggagtgcggcggcgccatcatggctcactgtagccttgagttcttgggctcaagcgatcctcccacctcagcctcccaagtcactgggactataggcacattccaccatgcctggctgattttcactttattttattttttgtagagatggagtcccattctgttagccaggctgtaagttttttaaatttgtgaaatggagacatctctctgggtgggttaaatgaaataatacaacttacctactctgcctagtgcctaggttccttgtgtgccctccataaatgatggttagttctgataatggtgtgttagttacacatggaatgggtgaataattctgacagggaagaagaatgaaaaataggaggtggttttggaatgattgctgagacagaattgctaatatttttaggtaaaaggaacgtaagggaaatattttcaggaaaaaatccaaaatgactgaaacagttgtgtttgagagtgaacatggtgaaaacttgtgccttgaaagtgatttcatatggccttttaaaaggccccttcaggagagagagctgtcggtttctgctttggtgtcatttcagtcttgcttggaacattgctctctgttgttgtgctgtctatggaaaaaagggtgaacctccagaagactcaccaggaatgggtcccaaaccacacttccctggagactcatcggggaacacctgctactggattttcagaacctgtttgtggattccaattcagtagatttgggggcagggggacaggcatctgtatatagtttgaaacagagatcctaggaaattctgaaatggggccaatgtgtcagtgggattcatcgggatgtcgtgggatttagcagctgtagtagcatcttcagttctgctaccaactttgtgtgtaaccccaggaaaatcacttaacctttttgtaccttctttaactcagccttctgaaagaggaggcataagggataataactctgacctactttacatcgttgtgaagaattactttaaaaaatgactgcaaagcactttgcaaatagaaattgctctataaatgtctgttttttaaaaaatgtaattttctaacacagttttaaacacaaatagtcttgttgagtgcatcagctcaaattacaagtatcaaatgacatggtatgatggctagaaatagtgtttttttttttaaatacccaaagttagaggcaataaggaaacaacacaaggttgtaatgtcgtcgtttatctgtatcatcgttaaaaaataatgctgacgctaacctctacatccacattttccggtttgttttgttttgtatttttaataggctactcccatgaatttgagaatttaattagaaaaataaatgacttctaccattgctgctgtgctgttaattctccccctccttcccaatctctcaatgaaaggcctgctcctcctgtcattagacacatctgtggatctgttagaagtctgtaaatggacgcacacctgcagagttggcaaagactctgtaagtccccatcctctgatgtaaggtgtgttttcctgtcattcatccatccctgcaggagcaccccaaacacctcctcttcaaatctgctgcagtgcagctcccaaaccaccctgtctctaaggctaagtaagacaactggaggcccattaatgcccaggtccacggattgtaagcttattttccacctccaaatttggtggcaggatggttgaggtggtaacaaatatcagacaagttagaggacagagtccatgtgaattcagaacacataattttaggcacttgtcactatatgtgtgtactgtagttaaaaaaaaaaatcgtaggtggcagtacagaatagttgctctggagtgtcaccagccaggtaaaaatcctggtcccgctgtggttttaggcaagggatctaacctcacgaagcctccattacctcatctttaacctgtggatgctaacagcaataatctcataacaatgctgtgaaggtcagtggaaataagcatagaaacttgttagttcagcgcctggaacatactaagtgttcaacatagctgagcgctcttaatctgctgacaaaggcagtggtgcccttgtaggaatagatggcaaaccatatggactaacgtggatttcagatgttctagtagtctacatttaaatatttttaagctcggctaccaataaacttaatggcttatgttttgttgggttttctcttaagttatattttgctaccatgtctgtatatatctgtagtttttcatacagataacacagtatgatgctttgtgcatccttcagcagtgtgttattgcaaacaaggagtgtgaaggttgggttggtaagcaaagaactgcctccatatttgagttctgtgatgcaaaaaagttactggatggctttcaactcttaattaatgtttctattgactgctgatgctaagaaagtattatcacttgttccctctgggtggtatacactgagatgaggtagataagaacaaccttggatgtactgtttcagttcccttggaaactataaatccaaaggtgaatttgcacgctatgtgcaagatgtatatgcttcccaatttcaactgcagttccctcagtccacagagaagtgttcttgttttgtactgtctattgactgggctaagcgttaatagcatcccagattcttcaatccagcaagctttagagccttttcacactgattctgagataagccaatttgccaactgctttcctagggtgaccacctgctcctggggtctgaaccatctgattttagataaattcaggctccacaatttgtagaatgccatttctttttcctttactttgtaacattgatatcactgctagatatctggaccttaaaaaagtaaaagaaacctctttaataaaaaggatgttttaaaatgatattacctgataattatgcttgcctatttttatacctcttcccccatttttccttgatgaaggtttttgtcttgtaatgaaacgtggtaataaagagcatattggatgggaaggtactctattgtcctaccagcttggtgtggagaaaataaaacgttaggtatacactgaattgttggttatcacccagtatgaattgtccttctcaccatggggtgtaccatatgcagactgttagcctgctctggggacctggagagatgccacattcttctgtttccaggctgattggaactgaaagggttgggcatgaatgttagggtggcctaaggtagtctttctgcctgcttgtttggaaagaattaggtgggagaacatgctgagagctactttccattgtatggttcttaatacctcagggctgattatagcattggagggagaagcaggtgcttgctagacaggtgcatgtaggcccaagggaacaaatgtaattcattgagccttagtttccatcacctgtgtattaagattcatcaaatggaagacgcccttgaatgtaagacctgctatcttttatgtacccctaaggaagaaaactcactaccaattaaactgtgctatattgctaagttaccatcaataatagtatctgtcctgatttcagagataaaagatgtaagttgtaaaatataaaagcacttatatcataaatttctaaggaccacattagatagtatacctgtaaagtatcagcagtgtcttaacatatagtgagcactcagtaatcattaactgtcttctctcagccctctctcctggtagtatttggtaaatacttcctacctggtaaatctttattgagcatgtaatatgtatctatcattgttttgtgtatctggcatatatcagtgaacaaaatagtacatagatcctagctctgttgcttatttttgatatcagggatataatgtggacttagggacctgccatcttggtaactaggagagtcgcccctcaactcagctctcctttcccaccaggggctgctttacttggccttgtctttggggttgaatgtgtgtgccagtagcataggcacatgtaagacctgccaaactccttccagtctcattgccttccagtgttttctgtgtaccttacactctgtctaagctgatggcataccttgcctcaaacaaaccatgctctctcccctctccctttatctgtcccgtgctgttctctccatctggtattttgtgtcccccaccatgaacatgcagattccccagcgaatcccatgagctgctgctctcctgatgccttacctcgtcctttcatctgagtgtaatttaccacctcaggctttctgcatgacactgctttacatctgctcctctgagggtactcacagaatgcgatactgatactgcagtcacgtggctattggcttctttttttatttttagtttttgagacggagtcttgttctgtctcccaggctggagtgcagtggcacaatctcggctcactgcaacctccgcctctcgggttcaggtgattctcgtgtctcagcctcccaagtagttgggattacaggtgcctaccactaagcctggctaatttttgtatgtttagtagagacagggtttccccatgttggccaggctggtctggaactcctgacctcaggtgatccacccactttggcctcccaaagtgctggggttaattgcgtgagccaccgtgcccgggcctggctgttattggcttcttaaggaagcccacttaacagtaattactggccaaagatacatgtttttattaatgcaaatcagcatgtcacactgaattatataaacatatagtgtgtatattaaacaaattaagtcatgaccttacaatcaggtcatatggtggtctgtacttaattatttttatattttattaacaggaagtgtgtaattaagcacggatggctcttcccacccctttcctttttacatatgtctgttctgtcttctcacatttctggactgacttaaacttgtcagccagaaagatggatgtcattcaggtattggcaggaagagatgcttctgtaaatagtctctttcacatctgggtgttcagttttcctgctggggctgagagaatctgatgagctttgggtatttctttccacagccgggactgatccagcctgtgcctcctctctggcgtaacctcatcctgtccttcctcatttttaacacccaagtgcagctgcaggggctttcatccgcctcagacttgccagtacccaccacttgaaactgggccctgctgtgattgtaagtctccatccagaaggagctgggtttttttctcaggactcaagagactgtgaaagtctgaaaaaattttgtgccaagagaaagaagtgcaaacatcctctgttttctgtctctaaagcagggtcagtggtttccagtgctgtgtttttatgtcatttgactaaccatctccctacaggcccaagcaaatgtgggcagtgcagatcaagcctgcttcccaggactttttgagagtgacggtggtacagtatttcactgtttgtagcatgcctatagactgccaatttacaggatttaaaaccttcctggcagatgtccagaggcctctggctcatatctacctagtttcatggttggctttctaactcttacataacagctggggtttttcactacatttaaattgttactcagaatttaatgtagtctttctaaaatgctgtcccctaggtggcttaacaaaggtgtaaatccagtctgtagaagccaagaaaggcattgcatatgagtatagctggtatttacatttcacatatgtatttttttccagttgacaaaaatcagcccagtaattttaccctgggttttcatcctagtaaagaaaattgttaaatattaccaaagtataaagtgatctttgattctaattggaaagcctttttttttttgatgctcaaaagtaatgttgtaaatgggtagaaaattgtccatttggttcctgctgtctgtcttttcctgcactttgatgaaggaaaggctttttttcccccagtccctagaagacctcaaaggagctgctttttgaaggaaaaggcttcattctccctgctcgaaagattgccacactatagatatttgaaaatcagatgcggtaatcagaaagctattctgatagtctgactgctctgccgatacaggttatattactctcacacaatatgttatcacgtaagggctggggaggacatacatacttcagtgggtaaactgaggttagggacatagggagcttgactgtgattccaagtatgtggtgagctcacaacccccaagattatcttatcctctaaacggtcttgtcatgcgcttttcaggagtcacattagaatctgctttctaagaccatatctagtggctgggctgttttttaatggatcacttccccttccatcttttgacactatctatccaattctcaggattctttgtctttcaaaacttcatgtgctgtattgaacttttcattttctcagattaaaggtggtcttttaacagttagcatacttgcttgttcatccatttctttgttagacacgtaacacaaattcaatccccaggagtatttaagcatctccggagcattctgtgttttggtctgtatttcagttaaagatctacaaaatcaagagagaacttctgaagtcaaaccaagcaggttcagatatctgcccaactttgttgattttcactctttctatggtgggataaacagggacagctgagaggtgttattagaaaactttcaactgagtcaaaaataaaagcaagggccaaagcttcttcaccctttgtctgtgtccatttaacttcccaaaatacttcttctctagatgaaatagaccattcagtatttcatcactaattttacatgtattatgtctccaggattaagattccttgtacttaggagaaaatattctcttatgaaagaatcatgtaagtattaattttttcattagtgtgttttatttcagagagacatgaatacatggagttttatattttaggtttttttagctctaaaagtacatgtgacattattaaagttggaatgcttcctttttttgctgtggagaaagtgaagtcatatttgaagaaaacattttaagaccttggatttaaaaattatagggacttggggctgggctcggtggctcatacctgtaatcccagcactttgagaggctgaggcaggtggatcatgaggtcaggagttcaagaccagtctggccaacataatgaaaccctgtctctactaaaaataaaaaaaaaattagccgggtgtgatggtgtgcacctttaatcccagctcctcgggaggctgaggcaggagaatcatgtgaactgcggaggtggaggtttcagtgagccgagatcatgccattgcattccagcccgggtgacaatgctcaactccacctgaaaaaaaaaggaaaaaaaaacatatatatatggacttggtgtggtggctcacacctgtaatctcagcactttgtgaggtcgaggtaggaggatcactttagcccaggaattcgagaccagcctgggcaacataggtagaccccatttctccaaataaaaagtaaaaaataaaaacctaaccaagggtggtggcacaggcctgtagtcccagctcctctagatgttgaggtaggaggatcacatgggtctgggagatcaagtctgcaatgtgttgtaattacaccactgtattctagctgggctgggagacagagtgagaccctgtaggtaggtaggtaggtaggtaggtaggtaggtaggtaggtaggtaggtagaattgtgttcatattgtagaaatccatatatctgagttagatttttaaaacgctgtctgactactgttgctcctggctacaacattaaaaaaaggtgtcctggttttcttttcaggaaagagcgatatttttatttttttcatagaaaacagaattaaaccaataaatgaagttattacacttttgagttggacaacttaaaacacacaatgtttgaaattataaagcatttttgcaagaagttgttatttggggtaacatattctgtcacagtatgctacttattccttctcttccccaacttcccccaccccttttttttttatataaatggtgtcatagtaaatatttattatagaatatgataactactggcctggttcttaatgcctggtttatactcttgctaagaaaagctcgagggtgactctcaaatctcaggctaattctaaaaccaacaattgagaagcctcctttctggatccaaaggcacatggtctctctcccctgcctccatgatcaaggaagacatcactagttgatcaggccgtcttcccagcagagcccagatgtgccctcctgattcttctcagcattgctctgaaagctgcctccatcagtcatgtcgaattggtactcacgatgaaatctctttgacatccttgaataaaagtgtgtttttatggaaggtccttttatgagcaaaaccctgtgctgaaggggattgcagaaaatcctttcttctgggaatttataagtctagtaaggaagattattgcagcactgggtagaaccataagcaaaatgcagacaaaagttcctgtaattaagggaacacagatgataacgattggcctggaagaattcttggttgctttgatcttatctgaaatcggactgtcagtgggacttctttctcaattgtggtaaagctaaggagccgatttcctttgtaactgctgagcagagaccaaggtacaggtctgaaggaacttataaagtcagtattttggaactggatgcagcggctcatacctgtaatcccagcactttggaggccatggtgggaaaaatcacttgaggccaggagtttgatgccagcaacatagcgagacccccgtctctgtggaaagtaaaacaattagctgggtgtagtggtgtgtgcctgtagtctcagctattctggaggctgaggcaagaggatggcttgagcccaagagttcgaggctatagtgagttatgattgtgccactgctccagcctgggcgacagaacaagaccacctctctttaaaaaaaaaaaaaaaaaaaaaaaaaaaatcggccgggctcacgcctgtaatcctagcactttgggaggccaaggcaggtggatcacttgaggtcaggagttcgagaccagcctggccaacacggtgaaaccctgtctctattaaaaatgcaaaacttagccaggcatggtggcgcatgcctgtagtcccagctactcgggaggctgaggtggggaatcgcttgaacctgggaggcggagtttgcagtgagccgggatcgtactactgtactccagcctgggcaacagagcaaaaaaaaaaaaaaaaaaaaaaatcagtttttcagaagtggaaatctagttgtgaaatatatattgggaggtcattggctgcatttggccacagttccacatgtaagatttggaggacgtggttagagtttgagtaatttaggatcaacagttcaatcctgtataatttagtgactcagtgcagcaataaaccctggaaccttctgcttctgtgtttctcctctgcaggaattaagggcagatagaaagaaagcaaacatgaattaatttgattttatgtgcttaaggagacataatgagaatctgttggtgaggtagaagttaccaccaatctacataaaaatgaataatactgacattaaaagaaagaacatcaattatgttgcagtgattgcaggtttaaatcatgttagggcttaggcttaacacgtaagagtctccagttcccgaatttgttgggccttacatggaagctgagatatgacagaggggtctgaaatactgccccccattccaagtgagatttcctactgttcctttcactgacttgccctttcactagatatgctatcttttctcagaaacactaaaaaggatttttgtgtttgcaaagagtaggaatgaaatggggtttttctaccccttctgataactgggtacttttaatggcaaggctattcttggtttcattccttggccaattttgagataattttttaagcacattggagcccacgtgctcagtggtggttcttcagcagaaaattcaaagatcagctactgagaattttagatttcctgttgtaagaggtcaaacaaatggtacaagttacataagcgtttcttcgatgataaaggagctgttttctctagataggtgtacccttttcagctagctaatatgaatctgtgtcaacacaggttttaattttttaatttttatgtattcattttttgagatagggtctcactctgtttcccaggttagagtgcaatgctgtgatcatggctcactgcagccttaacttcttggggccaagcaatcctcccacgtcagtcccccagttagccaggaccacaggtgcaccaccacacctgactaatttttaaaaatttttttgtagcaatacagtctcactgtgtttcctaggctcgtcttgagctcctgggctcaagcagttctcttgcctcagcctcccaaaatgctcaagcagttatcttgcctcagcctcccaaaatgctgggtttacagttatgagccatggcatctgacctcaactgaagttttaaaatctgtaggactatacagtttaaacctcaagggtagcaaagtaataatataaaaactacaatacatgaggtttgttagagaaatcgaattgctaatattgctgccatggtatttgtatacaataatataccaagtgagatttttatcgctgataaatattaaagtctgttccaaaatcatttaaacacttttttaaaatttggacatcaggttcagagagtttagtgatcatactcttcatggcatactgtcctccttggtttgtgaaggggctccttgtggtttgttttgctttacttcatttttctctttcactcatattccattcttttttccccaaagatgctgattagtagtatttttaattcacttatttttgtgtgatatatctcattatgctgttatgcattttaaatcaatgccaattttcaaagtctgttcacatgccttacgtacctcttcattgcttttgaatgctgtgtcctatttcgtgtattgatccatcccattcttacccattccccacagggagacactttgtttgtcctgatgaattttgcaaatttagtgaatttgtttgttgccgaatgtcaccaaaatgtgctccatcacttcctaggatgactctactgttgctctgcaccatctctgtttgaacatcaagagtcatatgagcttaccaaagattctcattgcctcgtatcctaatgttgtccaacccagtgggtatgaaatggtaactcactgttttaccttgcctttctcttgttgctggtgatgttgagcatcattttacacctttaaccactggattttcctctcctggatattgcctgttccaatttgttcctgttcctttcctttctatgctggtagtgactgtgttttcttaattatgtttaagaaattgagagtgaagccagccttgtagtacctggtgcaggctttgtgtctgtgagataactcccgaggctcctcctagaatttctttttgtcttttaacaatccaaggctgtcattttccctatgctgttgattcccacctgctttccccacagaaccccctgcctctgttcggtgcagccaggaggaaatctgagcaagccccagacggtccctgctttgattaaaactgtcaggggcttcccttggcacttaggtggaaggcctgaatctttgccaggtctcagccccacctcccatgattcaattcttgactctggttgtcccccattctttatgttctggccacagaagacctctgccttattcttccagcaccttctctgggctcagcacctcttattccctctgctgctcctgttgtcctctctgcatcctctttcacctggataacgtctactcttccagtttctcatagtgtctttaggaaagcccctcttgaccttcatactcctctctcctatgacaacctctatttccttctttcaaaccctttcaatacttatgaactgatacttaatacatttttggtttcaagacaaagaggggaagggggcagagacatttcccttgtgaacttcgtaatcatgaggtcagtacctgtgcctttgtttctccttactgtattttaagtgtctggccaggcaccagagacatagaagtccaattaatatttgttgagagtgggataaaagagtaggcaaattaaatgctaattccatcactttggcttcctatgttatttttactaaatatttgaacctatttttccatttgggactacttttgattctgcttttcacattcactatgaaaatacatttaattgcatttttcttgttgattgaataaatatacttaaatacatatctttctgttaatattgtctacaagtgtatttttaataggggatgtattttacatgtcattaccttaaatgtcattatataccatgctgctgcgtcatggtttgtatgattgtttccccattttgaagcattgttttcaatttcattattttataatgaaatgtaatatttcttggtataaattaatttcttttttccccaagttacttctttgaaattactgcgtttgaacagctcttattaaaggctgctagatcatttaaagaaagattgaagttggtttcattgccagcagtgtgtacctgtttatctagagctctaccaaaaattgaattttataatttcattgtattttaatagctgtgaagtgtaactttaaagttgtttcaatttgcatttctttcactcctggtaaatctgtgtatttttcaccaggatgatttacgcccccaatttcttctattttaattgtcagtgtgcatcatttgatgtccttctaatgtaattaaatcttttctttttgtgagtggtgtaaggagcgagtcctcaggatcttatctagctgccttctatttttatgaagtatttttgtagcctcataggatttccttctaagagtattccttggtactcttagaaaatgcgcaacagtatagtcagctttagaaataccccttctttatatataatttccatgggaatgtagttatggccccttaccactattaagaccaaaacagtcagcaaacaaaacaataactcttctatttacttgggtgagaactagcccactgagaaggtaggaggaatttgcataatgaagagggtgttttcttggttcccttttaaatttaaaaattactcatggatttgcattctgtagtgtctcagcatcatttagaattaggctttgcttactgaagtcaaactgcaaagcttcacttatgtatgacttaattaccctttaatgttaaaaagaggaaaaagtaaagaaaaaaaatcctttggaattggtcatcatgattgatttttgtgctcagaagaccgacagtcttttctaaaagttgtatagctgttttttgatcttttgcctttttgtttgatattcttgaataatctgcatagttttgatatttaattccccttattcttgtcaatcgggaccaagatttgggaggttggcatttctttattctccatgcagttaggagtttcttgtaaaacatttgaattatgcagagcctggaatcattttaagagtggtttgatgtgggtattttagtttactggcaggaaacagactctggaaacaagtcattgatgtttaggttttatttttttttcaccattttttagtatttttcttccaatttctttttgctttactggtttttctcatgctgaaaataacatgaacaggtgtatgtgaaggactgcagtggacagctgggcaggctgctcactgtgtgagagcaccagccaaggagaccaatggcggctgcatatcagagcaagggacaccttttcttttcatttaaactttagattcaggggatacatgtgcagttatgttatatggatgtattgcataatgttggagtttgggcttctgttgaacccatcacccaaatagtgagcgtagtccccagcaggtactttttcaacctttgaggggacaacgttttcttttttattttttttctgagacggagtctcgctctatcacccaggctggagtgcagtggcgcgatcttggctcactgcaagctccgcctcctgggttcatgccattctcctgcctcagcctcccgagtagctgggactacaggtgcccgccaccacgcccgcctaattttttgtatttttagtagagacgggatttcgctgtgctagccaggatggtttcaatctcctgacctcgtgatccgcctgcctcagcattccaaagtgctgggattacaggcgtgagccaccgcacccggccgagggacacctttttctgattcatacagatgcactctacgagtgcatatgtatgtgtatgcactcatatggatgtgtggcttcagtggttgctcagagttttctagatcttatatttctgtatgagtttctttacgtctttttgtaaccttgcttttgtggtcttcacaaagggatatccagtggtctgtgccttttattccattgaaagcatattccttactaagtctgcacccatggctggatgagcattacctcgttcattacacctgaagtgaacatacttggttatgtgactaatctctaagggaaatctccccagcttttagttttgtctgatgctttcttctcaccagtgtgaatgtctgggtttctaaagctgtgtaaactgagaggcgtggtcttagagaagagctcagctctcagagatcggtccaaatttactaaagaatcctattttgtttcagtgttataacaaaaggaaaacctccccccttttccagcctaattgagtatacttcacagtgggatcacaaaggctctggtttatgtcccatctgagtggaaaccttggttcatggagttacttttcctctcatctacagttcagtggtcctagaactgatgtcatgattaggtcaacattaaagattccactgatctctggctttttgacttctttgacctacgtttcctgtttggaaagggttaattacacttgacttaagcgtttctttttgtgattccatgtggggtgctggaataaggtataaagttgattaatagtcttggagctgggtcttctactttaagacccagttcaaatctgtgttccccatggggactttgaatttctgctccctgctcatttctagagaaatgttccagagaaatgtgactcccggcaatatttggtagctccttgccatctggtagtcatcattgactgcgtctctttcctgctatgaatacagcagtgtaggaggcagatacttgcctatgtccttgttttcacgttccgagtttaagcatctgaaagtattcttcgtaaattagttagaacggtcttggcctttatgaataaacatgctgttctgaaatgatactagttttccccctttagagtcaagtaccttcctggtttcattaattcaatcttcttcctagcttatttccaagaaattacaatattgacccatatcgaggtataattacctcaatatgtaagtaattttaacatgtagaaacaggttaggaaagatacacacaaaacaaataaattgtcatgaactctcctttgatgaggaggatgggcataggcagagaggaatacgtgggctttatatgggatgcattttatttttctccaaatgttaccatattgtttgagtctttttaaagcatatctattacatacataataattaagtgggctgggtgcggtgactcacgcctataatcccagcactttgggaggccaaggcgggcggatcaccaggtcaggagttccaggccagcctgaacaacatggtgaaaccccgtctctactgaaaatgtaaaaattagccgggcgtggtggtgcgtgcctgtagtcccagctactcaggaggctgaggcaggagaatcgcttgaacccaggtggcggaggttgcagtaggctgagatcaagccactgcactccagcctgggcaacagagtgagactctgtctcaaaaataaataaatgaataaataaaaattaagtgggcaagattttgaaacttatcttaagataaatagctctgtcggttctccatttccttttctttgcatgtttggaagcagggcagtgtttctccccctattttcctgttctgtgttttctgaatatttcagaacatctctctcacttcttttctgttgacttcaatatggcagtggaggggtagttgagctgaaatctgattaatgtagcaagagacggtgtcaagttagaggaaggcattgttgttctgtaattagagccgtgaaatatatcttatttgtcatcatcttattattctttggcctgtttctagagatcagcacaataaagtttgtaaatccttgttcagaagctatagtttaagccttgctgaatgaggccttttaggaacatattttttctttctttcttctttctattttatttttttgagaagtccaggaagtatctgattatgtttcagatgctctatgtaaatggaaattaattcttcagcaagaagacgcaatcacagagggtaagattggtgtttgcaaagcatcataatatcacttgatttaaagtcaaatatctgaacctgaatactataggaaatcccaaatagtgacactgagtttaagacagcttgagttgcattttataactcctggctgaacagcacaaataattgcagcccattcctgaattaatgtgtctgggtgtgggtcactttgcacagatgagggaaaagtagtcaagtaaactattcaactgcttttaattcttatgcataaaaatatacagagtgctattaaattagatatgaatcttacagcacttaaatcccttagcccaaatgcagtcagttacatttgccatgtaagacattttgatttaaactttagtcaggaagctgaggaaacagtctcctcttgagcctaaacattaaaagttggctgcatgtttttctttgttggcatttgtaaattgagtttttcacaggattctagacttatttttgggtgtgtgtgtgtatagagctacactatttaatgaaaatatagtttgattcagacatagggtggtgttgaaaattattttagtaatgagattatcatagttataaattgattttgaaaattctaattttcgtgttagatggcaccaaagagactattttaacctcctactccccaccttgtatgttttaaaataaatgatttctagaggttaagctgtgacaaaactgtgctgagaaaaaaaatctcactgtcaaattaggcacctttctgtgtgtgctgtaacatgagatcatgataatttagattaaaaatggagtttcatagatgcctattcgattgtttctctttaaatctgttattgttattattatatttatcttttaatcattatatgtttttaattgcttgcatgtgttaggtttcatacatgttcaaaatctattttatcctcataacagtcatgtagcatataggagctattatgatgtccatttttcaaatgaagacactgaggtataggaatattaaataatttgtcttgggttaagcaaactggtatatggtggctccatttccattacagatctcaagcttttaatcactcttgataaaaatcctacccagtgcctttttaagtttaaacattataacattctgaaaatgtcaaaataataagtcgaaattgatggtgaatgatgcccattcttgtggataatttttccttgcattctgagctgttttcttctgaagccttcgacctctcttcatcctagcgatgtggggactggaatgctacggaatcagctctactggctgatggcagatgcgttttgggtcaaggtggccgccaatgctttttgcgtcccctgcagctgctgagacaatatgaatctgtacggtggaggcctgccaagttagacgctcggctcctcattatgctttgggaactcacacgttccacaaacctcctgccctgcagtggctcacatcagtgcattgctatgtcaggctgaataattcgcagcatttagcacttaaattggctcattgcagacaatccaattagaataaagtctattatcgttttggtaccttggaatgaaatggagtgtttaagcggtgaacatgccacgttgcctggcagttgctccatgtctaactcatattcgtcttgcaggttctttgcgtgttgctaaaatcacaccctaccttagtgtgagccatgtatgaagctcagtaacatacctctcacacaggcgttatcttaatgtgtcagcattcagagggtcctgagagctagacaaacatgtcttaaaatcttggttacgtgtcctgctaacaatggacatttaattaaggttgcttttcagaagaatccaagcaaaggcggggcgtggtggctcacgcctgtaatcccagcactttgcgaggctgaggcaggcggatcacctgaggtcaggagtttgagaccagcctggccgacatggtgaaaccccgtgtctttactaaaaatacaaaacattatccgggtgtggtggcggacgcttgtaatcctagctaccaggaggctgcggcagaagaatcacttgaagccaagaggtggaggttgcagtgagccgagatcacgccgctgcgatctagcctgggcaacaagagcgaaactctgtctcaaaaaaataaacaaataaataaataaaagaagaagaagaggaagaatccaagcaggcattgataaaggacgaggcaaactaatgaatcatgtagcttagagatcagtaaaacagaagttagaagaagcagtttatagaactcttgaattttttcccctataacttggtcagtgataaatgagatgaggaggaaaatatgaggcaaaggcaggatggtggagagaagttccaaggaagacactaatcaaaaaaatacttggattgagaccaggatagaatgatggaaattttgatgtcaatgtgaaagtgaggcattctcaggggactaaatcagagagaaacgagaattaagtacaagttgttcctaacacatttatactcatcaggcttataaatgagaaaggaaatcagttattgaatgggaaatatgtatatatatatatacacacacacagagtatatgtacataaggtgagtatatgtgtgtgtatgtatttaattctcctatgatgcattgtggtactctgaagatactgttgggtgtttgagatactaattattcttttggagccacatgtaaaaataagaataagatcgccctgtacaaatagtactgaggataggaaatagtatggaaaagctccttatatttagtaaaagccatacatgttgtctaattattgtaactttaagctcaaaaatcacatggccaagaaaggtggcaaggatagcttcctttactcctttaaggttttgaaagggctgtatttgaattagataccacaggtggactggggagcggtgatgggaaatgcccttactgtcactgaatatggcagggatttaaaccatttctcgctacctctctcctttgtttttgtctgacacaggttttatattgccagccaacttatccttattgatttgttttacactgtgagtcaaaaggctacctcatttcctggtgggagatcgtggttctgtaaatactcctttatccctttgtaaatgctgttaaaggcttcttgaggagaattcggtggttgtgagggtgggactaggcaatctctgtagtcccttcccacagtgtagtaggagagttggttttgcacttggttccctgtgcctaaaatgttcccaaaagtcggggcattgatgcttgtaattcctgtgattcctgcattcccagtcagagatctgaactagcatgcttggtaagcattgcttttgaactgccaaggagtactggtttttacatggagtctagccatcagataccggctcatctcctgcttcattttcggtgctgcgttgaggttggagatacagatgtggttgatcatgcacagttaagtaggggagtgttttgggtctctgcaaagtaaggatgtggtagaaatagcaatacatctagagaatgatcacatggtgagtctgtttattagccaacaaatagaaagcaaatcaaaatgcagacagtatccatgtggtcatctgcgatgtgtgcatctctatgccttaggtgaaattccagggtctaaacagctttgtgcctccctccacgatggagtttcctacttaatgatgagcatgaattggaggagggttttgcccacagctgtcacaatccagtaggggtcactggtccatttggggagtgaagatggacaaatgggaatggtcctgagcggtcccattcatctccctagggaatcatggttgcatctcgtcatggggagggttttctgtttcatgtacctcctctaaaggaagatttttttttctctgattgatttatctgtggacctgcttatctactgttctacctagccatagagtttttaaataaaaaagtttctggaattgcttaaaaacttgttacatgtgccttccctcacccttacctctgcagctaagaagcctgtccttacaaaaggcgaacagtccagtcgtgggcaaggtttaagtaaaagcagtcactagtagctgctgtcttctaatcctattggttacccaagagaagaagaaaaatcattatatgatggtatccaggattccaggcactagttaggaaattttcttgatttcttacccataaccagctacagaagtgcttgtgacatactattgtggaggaggaagatgatccctggttgaggtgtttttctccatagggagatcccacatgcctgcactcgtccccacatctcagttctagaacaaactctccctcacttgtgaaagactcaaaacactcccctacttaataccaaccatatctgtatctccaacctcaagacagtccagagtctttccagctctgtgccttctggagaccatgtctagaaatgctcatcactctcaggctcctcccaaaatgtcatagtttgtacatgaatgagcatctactgagtgttcggatagttgtagttctccattttgaagtagattttttttaagactttttttattttttatttttgagacggagtcttgctctgttgccaggctggagtgcagtggcacaatctcggctcactgcaaactccacctcccgggttcaagtaattctcctgcctcagcctcctgaagagctgggaccataggcttgcaccaccacccccagctaatttttgtatttttagtttagacggggtttcaccatgttggccaggatggtctctgtcttctgacctcttgatccgcctgccttggcctcccaaagtgctgggattacaggcgtgagccactgcgcctggccaatactttatttttttagagcaattttaggtccacagcaaaattgagaggaaggtacagagatattccttatgccccctgagatacacatattttcatattttagcattttttaaatgtatgtgatttttaaacattgatgtactgttcattaaagaattggaaatacttaaaaaatttaatgggacatttaataaaaatgaattttgagttgatggtatcttagatttggtgaaatatgatgttttcctttggtgtctcctattcaatggtaagctttctttcattggataccagaaatcttggcttataatagttactttgtgtctcagcaaaccgtgagggtcttgttataataaaattaacaattaattactttcttttctccttccttcttgtcttccatccatctccttccatccatctccttccttccttccttccttccttccttccttccttccttccttcttacctatctacagcttagggaaaaagatgggacagattactatttagctttaggaaagtcttattttcttttattttaatttaatatttaagatattggtaaagataaatcttgttgaagagctgttgaaaacaaaatgatgagagaatgagaacatatcgaagtaagatgatgacagaaagctgagatggaaaatagcatgctaaaatctagtaggataacgggatggatctttagcccttggtgagtgacattacaggttaagcgtccctaatctgaaaattggagctccaaaaaacacttcaaaatgtacggctttttggctgccagcatggtatcaaagtggaaaatccacacatgacttcatgtgacgagttgcattcaaaatacagtcacaactttgtttcaggcacaaacttattaattaaaaatattgtttaaaattaccttcagactatatgcatatataaggtatatgtgaaagttaaatgaatttcatgtttagacttggctctcacatttagactcaagatttctaagatatctcattatttatttgaaaatattccaaaatttgaaaaaatccaaaatctgaaattttggattttttggaaaaggttcctcaacctctactggattctgtacttacaggttaggaaattgttttttttctgtaacatctttatgtgaagcaaaaagcagagtttatgcatattgagctttattaaaccatgccttaacatttgtacatgtcaccttacttgagtttccacaacctctgtttaacataataaattaagcatccagatctgtctttaatgtatcaagcatgaccctagatttagtataaaggaagctcttccagaaatgtaaattttactcagttagtcaacattttgcagcttgttgagtttccttctgcaggcatatcctgcttgtgagccctgtacttttaagtgaatgtgatctgccctgaggattccttttccccagcagtatgctatttctcagccaaaagtactaaaatcacttcaagggacttgattcataggtaaaatacaattcacaagtaattctggaaagcattcttctcctggatatctgccctgcatgttcacttagaaaggtcgtttagtcattcaacacacatttcatgaatgtttgtgctaaatgcttggcatgcaggcttcctgccttcaaaagatgtgcgctctggttggggagatggacaagaaagctggcaatagtagcagagatgcacagggagtgacaggagcatgtaggtgcatacacttgtgtaggaatgtgtctgtgtgagtgtgtgtgtgtgtacgcttgtgcgcgtttgttattgctgcaggacctaaggggaatccttctttggtacagactcaggagcctgcacttaactatttcttgtctggagcatgctctccctcaccctcagctgtcatataacttgctccttagctcagttcaggtcttttatcttttgaggcaggctcttactctgtggcccaggccggagtacattggtgtgatcatggctcactgcagcctcggcttcctgggctcaggtgatcgtcctgcttcagcctcctgaatagctgggattacaggtgcgtgccaccatacctggctaatttttgtatttttggtaaagacagagtttagccatgttgccgaggctggtcttgagttccagaactcaggtactctgcctggcttggcctcgcaaagtgttggggttacaagcgtaagccaccataccccacccaaattaacctctttaaaacattatttctatcctgctctattcccttatgccccactacgccttgaattttcttcataaagattatccccactaggtattgtatcattgttgtctcacactctccaatagaatttaactctttttaccctgttcttttcccactgcctagagcttagtaggtactgattaaaatgtattaagttaatgctgtgacataccagctctgacttttccataatttgagcccattaactattgtgtcttccccaaacttcacaaaattaatcattattttgcacgtgtgtcagtggagaccctgagctgtgtgaaaataagcgatggctttagaaaagtgctaagaattgatttaaccgtacatcatatttgctgttcctatgcatatctttacttgctccgtgaaatcgccagcgttttcccaaaagcagacactctttttttattttttatttttattattattatacttcaagttttagggtacatgtgcacaacgagcaggtttgttacatacgtatacatgtgccatgctggtgtgctgcacccattaactcgtcatttagcattaggtatatctcctaatgccaacccttcccctccccccaccccacaacagcccccggtgtgtgatgttccccttcctgtctccatgtgttctcattgttcagttcccacctatgagcgagaacagttcccacctatgagcaccaccatgtccagtttattttttgtatttttttttttttttttttgtagagacagggtctcaccatgttgcacaggctggtcttgaactgttgggctcaagcattttgggaggcccacctcagcctcccaaaacactgggactataagcatgagccactgtgcccggctttgttggtttttctatcactatgctattatgctataaaatatagtaaaggggatgtattaactgttaattttatcaagtaaacgattcatcttcgagaataactaggagaaacattcatttccattatactatttgctataagacaatttcatagacatttttagaggtttctttaagatatcctgtattagttcttatgctatagaaagctagggcttttcccatcgttggatctcctactggattttcctttttttctgctattcaaaatttatgtttcctcttgggctcactttcctttcctcaaaggtgtactgctgtagtgtgttctctctgtgccatggctccagttggccggcagtcaggtggcctgtccttctgtctgccagaatggtcctgtgaccatgcagatcctgacctgcacttgcaggtcacagggtcagctgcttctggatatggcaagtcctaatttggaaactggattccatcctgcctaccaccagcccagaaggaaggaaatggagtttgtggtggaagaaaaccggctattgttattaacaggaggttatattaagcactgtcatttttagcacattctaaataaatgccttatattgaagagccagagaaggaaacggaaactttgaagcaccttgattaaaaagtatgagcttaattacaattggcacaaattgttcagcatctcccacgtgctgtcactgtgctgagtacttacatgtagtagtgaacaagacagctatggaagaaataattgctcctgctgaaaatactatggcagtgaaacagaagatgggatgaagtatttgagtaggtgatttaatcctctggtccaggggtcagtaaagtttttctgaaaagggccagatagcaaatgttttaggcttgtgagggtcatatggtctctgctgcaactatttgtctttgtcattgtagtaaaaaagcaactgttgtggactgaatgtttctgttgctctgaaattcatatactgaagccttgctccccagtgtgatggtatttggaggtggggcatttgggaagtaattaggtcataagcgtggagctctcataaatgggattattgcctttgtctaaagagtcagaagagagatgatatctgcaagccaggaaggttatattgaaatctttgtaagaaccccacagaacacactggtcccctgattttggacttcctagcctccagaactgtgagaaataaatttctattagttaagccacctagtttgtggtattttgtcatagcggctcaaggtgacttaagacagaatcataaatagtacacaaatggacatggcttctttcagtaaaactttatttataaaaacagatggcagtctgcatttggcccattggccgcattctgctgacccatcaccttggtgctttttctgctttttctctgttgtcctctgtgtgtgttcctttgtcctgatccttgtcaccttgtgggtccaaaatggttccactagcctcatggagcctggccttacattgcagagtccaaagcaggagctgagggaaaatgaaaaacaacttcttcatcaccggaagcccagcaaacttctccttaaaaatcactggtcagggctgggtgcagtggctcacacttgtaatgccagcactttgggaggctgagatgggcagatcacctgaggtgaggagttcgagaccagcctggccaacatggtgaaacctcatctctacaaaaatgcaaaaattagccgggcctggtggcgtgtgcctgtaatcccagctactcaggaggctgaggcaggagaatttcatgaacctgggaggcggaggttgcagtgagccaagactgtgccactgccttccagcctgggtgacagaatgagactctatctttaaaaaaaaaaaaaatcatcattggtcaaagttgcagcacctgccaacctatacgccagtgttcaccagaggggattaggattcttataactggcttgtcccgagcatgacttattccttgggatgaatacattactgttccaacaaaatccctgttgatgaggtaaccagcagtgtttccataggaactcgagctcctggctattcctagcctggttctctgaccagcagcaccagcgtcacctgccagcttgttagaatggcagaacctcagacccttcctgtaactactatatcagaatagaaaccgcattttagcaagatctgcaggtcattcacagacacagtaaagttttagacatgctgatctggagaggtaatggagggctattttaaggaaatccatggaaataaacttggagaaagagtagcttgagtggttggtagctgatatggttcggatctgtgtctccccccagatctcatgttcagttgtagtacccagtgttggagttgggtcctggtgagaggtgattggttcatgggggtggcttttcatgaatggtttagcaccatccccttggtgctgttcttgtgacagtgagatccagttgtctaaaagtgtgtagcacctccccctcctctctcttgctcctactccagccatgtgatacgtgtgcctctccttcaccttcctccatgattgtaagtttactgaggccttcccagaagccaagtaggttgcaataccatgcatcctgtacaggctgcagaactgtgagccaattaaacctcttttcttcataaattactcagtctcagtcctcctttcttccccttccctccctccctccctccctccctccctccttccttccttccttccttccttccactaacatcataaggtatttttttatatcagtgcaagaacagattaatatggtagcccagccttgactcccattcatataaatgccattataattccagtttgtagtgatatctcagatttaatccacatcttagtacattttatggtgtttagtgttcatagtggaccataattatttagaggatcctctttactcctttttgcctccagcaagttctgacagtgttcatagtgttaggaggttgaaattaaaacaaaaacgaaaaaaacagttcggggggaagaaaaaaaaaatctgtacatgttgtccttttctacctgtaatgtagtgcatgcagatgacaggacatttcttgtctttattttgaaaatcatttgccatcgttcatgatgtgcaactgcatgagtacatatgactgtcaagtgtctggattctatttctgaattcaggaaactccagagttaagcaaccaaattccatttcagaatccgcttctatttttgttctgttcatttgatcttttccatcggtaggcacattagcttactaagcataaagaacttttttttcctcccagctatatattctccacaaaacactgagggcttccctgggaaataaatccctggctaaatggaaatgtggttggtttcatggtatatcttcaggtcttggacaacagctctgtgcttgcagtcttctttgtgtgacatttggaggccgagctctcaaatgtcccttgaatttcattaactggtgtgctgttttgagttaactgtggagagaggcctattggagatggtccctgccagttgggcagctctcccacttggctgttttgagaattgttatatcctgtactatggaaacaggatgaacttggccatgagtgtgggccagaagcctctatcccatttatgcggacttgctggctgagttttgagaagtgcatgatttcatttgggctgtggtttgctgctaaccgtgtgagtctgcaaaatgatcccttttaagtagaaccaggacagaataaccctggagctatgtttggtgtggtttgtctgcaagggttaaaagctcactacaggatgttgctgctttataaaattgaggcctccttgaaagttgtgtcatttctatgctttatgaataggattatcttctttatgcagcagtcatttgatgttgaatagaagctgaagatacagttcctctgtaaagatttcatcattgtttgattggtaaaggtggacattttcccccctttccaggtgaggtatacgtgcgttcaaagagggatggggcaggaaggtggttggcggtggtcagaaagccatctgtaactcaggtgattttcctgtaccggtcacctagctgaatctgaatgagagttttttgtaaagttgtggtagaagataaattagcctgatgatggattatgcactatttctcttctgctataaggggtatgaggccggaggttaggagactcacacacagtcatgttgtctgtcagagggaggatgaagccgagagttgagtggccttcaagctccctctggttgctcataccttgtttctttctccttcttatgagttgggaacatgcccaagaaaccttgtaagtgtgaaatacagcatgcctagtctctcctgcagaataatgcgaccccatatttgttaaccacacagaccttagaatgtgacagttttctagcttaagtgaattggaatgaaaccctatcacattttccaaaccagacttattttgcctgagtccatttttttaatcccctactttctacttgaaaaatgaaattgcttgaatttactgaaagaaaaagtcatagcaattgtcagactgcatgaggagggtatttattcagatttcatggatggggccagtattttctggaacatgttgctgaagtttatgagcatttaaattataggatgctatttgggattctccctaaaacaaaagcttttatagtgtgatactatgcttttaagaagacaaaaacactggtttgatttttttttcatttcagtttttacttctgttttaaaagtttaaatatattttctagagatactggagataagggggatgaaaatgtcttatctcttttcagggttgatatatatttatagaaaggtatcagatgtattgtgacagtctatagatgtaataaaatatttcactataaaacagttgattggagtcatacagtggttctcaactaaaggtgatttttctcttcccctactcctggggacatttggcagtggatggagacatgtgtggttgtcacaacgggaaggatgttgctattggcagtctagcgagtagaggccggggatgccactgaacatcctacaatgcacaaggacaacccccacagcaaaggagtctttggccccaaatgagaaaccctagagtggcataaccaaaaccaaatgctttaataaatacccagccctgaggttttggtatttaaagtgacatttaacatcaccaaaaacatgtcaaaaatgtgtcagccatttaacacatgcataaagccttcttttttaaaataacagatgtgagacttctgagccacatttttcctagaggttgttctctctctgggaatgaataccgaggtgctatttcacattataaaatttttagctactgaagaattatgtttaaatttgaaaaaaaaaatacttttgctttttaccagatcgagcgtttctttagtggcattctcttttaatccagtgattttcaagtgaccccgtatttagtcctaaagttccatttctcaactgaaactcaacatttagttgagtagcccattctagttctatatgcttttcataatgggcttcctttgagcaaagttcatgcattgcacctaaccgtcctttggatgtgagtttttcattgtggattactgcccaaagaagtgatgaattaaattgttaaactcatttagctgtgacctgagatgaatagagtgcatttgaaaaatgagcacaggttgtttatgagccgtcgtgtcggcatcacacttcagagtcggtgtagatgtctaccgctctagccctatgggctgcagtgattcaggagcaagagcgagcagtgggttctttctaacgtgtcagccttttgaccttgagctgcattaaggctttcacatgtgcagttgattaagatttttattttcttcctttatttcatttgtaccatatgcacagagagtcgtggataacagtttagactaaataaaggacattgaattgtcagtaatgaaatatcttgttttaattaaaactattagtaatgctctttcttgccctggatactaggatattgacatacttaatggtagaataacagataatgcggtatttttttttttttttgctttttactcctacaaattgcttttaaattctctaagatctggttgacaattgccagtataagtatttatagagaaagataaagatggagctacctacactgtatctataaatacagctgtacatataaaatttgatggtgacagccatcttgcctgtttcagctgtgtgtgtttttaggaagatttgaatataaaagatttgtatttatataaattattttttgtattttgtgtggcttcataccctcaagggtgactttgaaaggtatcttgacccagggacaccaacgagtttattccaacaattccacgtggaagaatgtcagtgattccctggaggtcagagttccgtctccccctgtcttctcagcagtgtgatgaggggctcccagcacacagattatcacttccattccttttgggatgtagacctgcatcttatgtgttgcgtcttacttttgagttactgtgaacaactgttttcttcatctgccagttaaagacaaattacaaggaggaaaggatggaaaatacaggaaaagagtgtgaaagcccaagaacttaaagctctggatgtacagttgttcttttttgtggagtcaagcgtcattgtggcatcctctatgggtgttccaaaattacaattatagttagagaaataatataggtaattatgctgtcgaaccactgtaaaggagagcacgtaaaagaaggcagtgcggccaggcgcagtggctcatgcttgtaatcctagcactttgggaggccgaggccggtggatcatcacgaggtcaggagttcgagaccagcctggccaatatggtgaaaccccatctctactaaaaaatacaaaatacagaaattagccgggcatggtggcgcacctgtagtcccagctactcgggaagcagaagaatcacttgaacctgggaggcagaggttgcagtgagctgagatcacgccactgcagtccagcctgggtgacagagtgcagcgcctaattcattgcttagaagggcccaaagctccttcctgcccgtgggccatgtgctgtggttcctgcagcctccccaacctgatcttctctgtttgcttttgctcattttgcttctgcagcactcactgctgggccactttgctctgttctgatttgcattcttgttctgtgctacctgtgcctggaaggctctggaaggttttgcgatgttgagcgcattttcaccctcaacagttctgcttaaaggtttattacttgttgtggctaactccaagttactttgctgccgtttttctggaatcctgcttgatgatatttggtaaatagaataatgttggcacagacacactgctcttctgtttcatgtgtggtagtggtatgtccacagtcttttttgattcttcccttactaagtcatggccacgttacccgtgctgcctccggagctaagctaacctcactggatctgctggcgagggactgtgtgtcccgggcccaaatgggttactgctcttacacaagtcaagaccccgtgtcctcttagagctgccttcccaccctcttctaaccttgactttactaatttaagtttatgatctaacatgatcaaacgcacaactgagtctatgttgtttactttctggtggcttcaaagaatatccaaccacctccattcccctcaaaacaaaaacaaaaacaaaaacaccaggagattcattcaaggatgatgaccatattatcatttttcattgtctgatccatgttatttgttgagtggatgttatgacaaactctcatgtttaataacaaaatcgtgtttctgttcttagctccaaagccagacctttggtcctaaagtttttgaagcttctggttgaaacattgctcttctatgttgtcttcctttcttaggaatggtcaacctttattgtactcatgacattcatcatttgtattttcattttttatttttttactatttaaaacatgttttttgctaacaatattttcccctgccaaaatctgtttgcttttaaaaaatgaattagcttagatttactctccaggtcaattatatatctaccactaagtgtgtgtcagatggggtctgcaggtgtgggaccaactagctcctttctgaagccaatggtttggtaaagctttgtgacctgagagctgcatctttggattggatattacatagattcttgtaatgcagcactgcatggaattatcccaatgtgggcatcggtgttgaacacaacagaccataaaattccatttcatttctgttgcataaacataggatcacaaatagtgtgattatttctagcagcctcaggcgtcttagccagggggaacatgtaggagactatgaatacttaaatatattataagcttccccacatgagctgaccaagtacctttgacactagcctttaaaagggtcgaatataaaaacctctaatacggtcacttgctgagttcttactgtgtgcaaggcgctgttttcatgctttcatttgcattatcacagcaagtcttcaagctagcattgtagtgcattatattctcacttcacagctgagggcatggaagcccagagaggtcatgacacttggcagaattgcacagtaagggcaaaaggtgggttttgaacccatgtcttttgactcaaaacttgtaaccaccaccaccaaaatcttggtcagaaacaattcagtttctctcacagttgctttgatcttgattggctttcccttatgggtttttcaggcgcagcattctcgtgttctccttgtctcagtatttcatgggaggcaggcagtgccgcagagccttgaggaagactaatctggaccaagactggggctagaataaatgaatgaaaccccccacttgctacttcacttttagctaaaaagtccaaaatggttaaattggctgtctgaaacccatatggctgagaatttgtggtcagacaagcaaaactgagcacagcctctgctgcgatcctgtgattggggtccccaaagcaaatgtctgttggagttcctcagaaagcataaatatgcaaaacaaaaaggtaaaagacagtaggaaatagtggagctggggtctatgtggaaaggtacatttctcttttcaacttcaggttaaaaagtagtaacaaaatcctaaaaacctggtggtgaatcaaaatgatgctgagatacgattttgtcccctctgcagtaagagtgctgatctgtgatggcagagatcttttttattcttttttgctctcaactattaattgtactgggtacctgatgggcactcattaaatatgttgtgaacaaataacaaaccactgtaagactcagttttctcatctataaaatagtcatgatgagagttcacagctcagggggtaaaatgagattccccaccaagcatacgttgcttctggtgtctggtgagtgtaagtgataatggaagtgctgactgttaataacaatttccactaattgattaattgattattaccatgtcactcctccatgctttacttggtagcaatgaccttttgtaaagggtcacctaagaccatcagagtgtgactcaacattgacggtggccactgacgccccttccactgctctctagtcccatggtttcctctccattttctagagtgttttttagatactgtatctcaccagtagccataggaaatgatgagataatcaaacagatttctgccttgtctcctcaatgataccagttttttctttctttggcatttatatcaaacatgtaatcagtagatcagctagtttgaaaatagtctccactgcagaaattcaccccattagatatctgtgccatcaagcccagggaaagcaaatttcctctctgcaagtgagccacatgtgggtcaggcaggctcatgctttcgctcctgcacctgtgttttcgtgtctgaatattttatgggcttaaagatgcagctacaatttcctcactttgtggggacatttagcttgttctacagggtgtttagactttcagtggtgtggggatgtgtattctaacaagaacaaaagaaaggtgccagtcttaagcgtagctctcatcacattaagttttatatatgcatatatagagatgtgtatatatttttaaatgtattaattagaatcactgacactgcatattctggtgtatgtcagaatgccctaggagatggatgcttaagtaatctgcagagtggattatatccttgcatttgctctaaaacttggatttgctaatactgactgtgctattcacaaaatttaaatatcttttctcggtgtgtgcatttgcaatcctgtttttctgctgtaacaatagtccaagtaacagtgacttttaacgatatgctgaattttgttctcatctagtagtctgtcctccagcaatttagggctgatctggtgactatgttgagttgatcctgactacgcctatcttgctcctgtgttgtccaccacctgtctcatgatcacaggtggggaccccagttcctgccatcatatctgcattgtggccagctggaaggtacaaagtatagagtatgtctcattcccttttaagagtgtgtgctgctcccactcttgtcctattggtcagaatttattcacatgtacatccctagctgcaagggaagctgggacatgtagtcttaaacttgggtggccagcagccactgacctgggggttctattgcttattttgttgaaataaattgacatagtcttctgaccatggggagcttatttgtcctgttgtgtatcatgcccctggtgctcaaatcagtggctggcacatcatgatgcatgggatgcgttgcttaaatgaatgaatgaaatggagttcatctcctctttggaacttcttgagtgcggagttcccaacacgtcccttccaccttcctttcacagctcttctttccattccaggggtttacagacatcctcctctccttcccacacatgtgcctttactggctctgaagagagctgccacgtgcagcccccatctccgcctctccctacaccaggcccagcacccacattccctttaactgttgtgcattttcataagctgaggtccttcccccatccttgtctctcacctccaaacacattccagtttgctcatttattctttaaaagtgtgatctacataatggagcacagcttctcagttttgcaagtaacagatggacagaatacgtcctgcttcgtgtgcttttgatggacatcctgtcttctccacactcttgactacaatttctttctgtgtggcacagaacatggcaaaattacgcacgtgcacacatacagactcacacacccaaccccaccaaaaatacatattaaacaaacttcatggcaggcagaagaaaggaactttcttgatctttctccagatgcaaaaagaaacactacctaaagcagtgtagacagtttaggcataagggcagctggacagtggtacattttataccactgttagtatacttgtgccatgtagggctttatattgaccactgactttactgctgatatctttttttaatcgtattcttattctcggagtcccttacctttttttttttttaatgttgtaatttctgtatatttgcaagatgtcccaaatccaagaagtcatcatatatataaagtatgtatatcttagaattatattaatattagccaacctcacctaatcctgtctgtcctgggcattgttctgagcacttcatatagaatatttaatttaataactgcttggtttaaatgatggtgttcccttcaaaatgcgtgttgaaacttaatccccagtgtaaaagtattaaggtgtggccttggatggtgatgaggtcatgaggactttgccctcatgaatggtattactacccttataaaagagattaaagttgaatgaagtgctgtcttgcccttctattccctctgccacatgaggaaacagcgttcctcttctctggagattgcaatacaaggcaccatcttggaagcagagaacagctctcatcagacatcagtcctgttggtgccttgactttggacgtcccatcttctaggaccatgagaaatagatttctgttctttatcaattactcagttgcaggaattttgttacagcagcacagacagactaagacaattaccctgtgggacaggtactagttctatcctctttaagtgaggtgagtaacttgcccatgaattcttttcagagatgagattcagtaccaggtgacttgaatccagaactcatgctcttgagtaatcattaagctctactgtatttatttgtgacttttttagcttggctttgaccaggtgggaccatgggcatcatcatagtttactgtgcatcaaataaataaaagccagaaagtagtcacattcaaccccctacccgccccctactggtcaaaacagagctgtgctcggtctgctggaggtacagatgagggccagagcaagagctgtgtgttgagatgggctaattttcattgtagctgtgtagctccaattttttccttaacatgtctactatgaaaggggatcatcgctttttagttcttcctaacactgtgagggctttaggttatggcgtctgaaatccttacgttttggatgtggaaattgtgtgttatttatagctgacacatgaagagaattaccagaagtgataatggaggaggaataccttctgtgattttactttatcaaaagcaaccactgcgaaaacatccccttataaaagccatatgagggaataggatgtttggcttagaagcagaacttgatccttgaagaagttcacacaagtgatgtacacagcagaaatgcttttaatccccacaggtatcttgcgaatcagatgaccaggcagaggaggcttttttttgagacatccctcggggatgctatgaactaaaatgggaatcgtcttctctaaatgtagtgcaccgttgccctgtcatttagatgagatgtagcatcaaaggaaatcactggggatattcagttgctaaagtctttccttgaaagatgcaaaccttcaaggagacctaacctgtgtgagagattgctttctggagagtcaacctaggcaagcaaagtgcttgaatatgcccaccagatttggcgtccctggccttccttttaatgtgagaactgctggccatttcattttgaccctggtttcactgctgtcgcaaagtgtccttttgaatcccgtggtagcttgtgcaaggttcctcgtgctctttcacatcccagacatggagttaccattctcttgtaaaccaaacccagtttctgggtgaggctgtctctagatattatcagatcccaagtcttagaagccatttgaaatacccttcattgaggatttaaggctgatcgtattttcattatttagaacaaatgcttaaaaataatgtaaaaccaactttactctgatgaaggcagctgaagccatcatacttcataagttctctcttcttttctttgaggcctggaaacttggaaacattttcacagcttcttgcttattttagaggcaagaaacatgcagtcagagtgatcacagtttcagatttataacaggtgacggcaaaaggagaacattgtgctcatcaaactgctgtgccacttccacctcccagctccagtatatttattaacgtcttttgagtaaagtcttaaaattatctattaagcacaatttttcaccctttctgatagatcactggtgctgccaagaagcttttaagctgtaaatgaaaaggaaaaacaatcctgcatttgatcttggggtttttttttttcccccttcagtgaattatcttagaacagaattttgccatgagtgcttttattggaatttaaaactataataccgacttttccttcagtctgggcttaaggtttcccactgttctaagactgcatttgaagttatctatcttatcttagtgaaagtttaaaaaatactcttcctttgcatttaaatttctttctctgtggttaactaaatccgaatgagtcattttatcaaagctttaacatgtatgtttgttttctgggtagcttatcacccctttttctttttcctttttttttttttttactttaaaagtttttttatatttggttggataaccacatgatacgggtgtataaagttgtttgtatgaccataaactttgaaaatgggttttaagaaggcatttgcaccatcttatcctgcaaattagtaactttctgatctggaaaaggacttttgctatgcctcatacatttccctggagtttgatgtaaattgaaatttattatgaatcaaattcaattttaggtgttcttgaggaatctgtaaatgccagttgagaggggaaattgattttgcgttcagccctctatgatgaatatccccgtgtttgacacgtgtaagtgttccgcttatgttagttatttttcctaataacctttcagaagtgtctgctaatgaaagttgtacctgtttttttcacttaaggtgcggtcagttgaaatatttgctgttgctctatattttatgcagagtctaatgcttacgctacgttataaactgagtctaaatggaaaatgaaaattttcattatagttgtctttttttctaggagaaattaacaggtacatcttctggaatgagaaaaaagtaatagcattgcttaacattttcactattcaatatccaggtataattggtttcgagatttttgctttgggggtgaaatatttcatgagcggccattaattcccataataactgatgtaaaaactgagctttatgaatggaaaagtagattcagacatcaatcatatttgcttgggatcaccccctgcagttcagcataaatctgtgatttccattataatacgtttaaattactgcagcacctgggaaaaccggaactgggtacaggcgcgatgtccacactcaccattttgacagttgtttggatcccgttcaaactggcagtcacacttgtagtgtgtttaggagcagtttttgcacaacttaaggaagcatttaaaaataaaacactgttttctgatagaaagcagccctatatttactcacacgaggtttgcaaagctcagtggaataatttgacatgaagtgcctctaagcagacctcaaacaagctccttgcctcccataagcttagaaagaggatgcttacatagcaaaactgagtaaatatgcacagggctcataaaaagtcgtaagtgatggaacctaaagaaaaagccagtgcttaataaaatcgcagtgtgaagatagattgctaaatctgtcatcctaggaaaatgccaggcaaatacacagaaactgctgaagattttataagattgtttaaggtttagccatgtaaaagaagtaaggtgctgcattttgggagaagataatccatactctatttctgaaatgttgggtttctagttttcaataatagtacatgaaatggtttgagagttatatttaactttattctcctgcattgatccaaaaggtccaataaaatgttagattttattatttgagaagtaatcatttattttgcaaagctaaatagggaactctgttttgccctttcatgaagagatggagtttctgcagctggagcaccatgtgcagctccatgggctttgcaatgtccacccatgtttgatggagaaagagagtaacattttggataacttttgaattgaatggaaagaagtattggtggggtccatgtcttggcttccttactgacttgtcttttttttttttttttttttttttttttttttttttgagacagtcttgctctgttgcccaggctggagtacagtggcgacctatctcagctcactgcaacctctgcctcccaggttcaagcaattctcctgcctcagcctcctgagtagcagggattacaggcacctaccaccatgcctggctgatttttgtatttttagtagagacagggttttaccaggttggccaggctggtctcgaattcctgacgtcaggtgatccacctgcctcgctgggtggatgaagtgctgggattacaggcgtgagccaccgtgcccaggcactgacttgtttttaatgtggttgcattacttacttttctgcaccttctttaactttaaatgaaaaataacctttcctagcaaaatactgagtgcgtaattagtagataggtgagatagcactgctggcagaggtcatgcatgaatgaatgaaacttgagaaatgctggacttcagaacaattaatctcatagcagtgaggatactctgaaggaagtgccaagattttttttctccttcactgattcctcctttctgccctggttgtttttgcatctgatttggcatgtgctctgtgtgtcttgtgatgatttcttgttttgttctcttggtagaattacacatttctcaaggggattttattctggtttttattgatttctatggattcagtagatgcttttatttatttatttatttattttttatttttttgacagagtctcgctctgttggccaggctggagtgcagtggcgcgatcttggctcactgcaagctccgcctcctgggttcatgccattctcctgcctcagcctcccaagtagctgggactacaggcgcctgccaccatgcccggctaatttttttgtatttttagtagagatggggtttcaccgtgttagccaggatgatctcgatctcctgacctcatgatccgcccgcctcggcctcccaaagtgctgcgttagatgcttcttatatgatggtcaaaccaatgtggtctggtggaaggagttctgtagttgagatcagacacattgacattctgatcccaacagcagccattacttattgactcttcttaggcaagttaatttacagctctgtgcactcttcttcctgtattaaatggaaagaatactgccatctcacaaacttgttgtgtggatccaaggtgataatcattcatgagtgcaataattgccatacttgtcataataatccagcaaccattgtcctgcagtcgtccaacatgcttcatccatgtaaagggcttcgcccagtgcctgaaatctatgactctcattattatgattctctatcagggataatctcagagagtcagatgatcagttaagaggtcagtgatttaggccaggcatggtggctcacgccggtaatcccagcgctttgggaggctgaggcgggcagatcatgaggttaggagatcgagaccgtcctggccaacatgatgaaaccccgtctctactaaaatacaaaaaattagccgggcatggcggtgcatgcctgtagccccagctgcttgggaggctgaggcaggggaatctcttgaacccaggaggcggaggttgcagtgagccgagagcgccactgcactccagcctgggcgacaagcaaaactccatctcaacaaaacaaaacaaaaaaacaggtcgtgatttatagatgccataaaatatgacattttgctgaactaaccattgaaatttgatcaatagtctccctccaacttcccctttttttggtctttaaaaacagtttttttcattcttaagaagtttgactcacactctattggcttatgctttgtttataaagaaatatttgatttgctaaccagcatgtaagaatagatttttttttttctttagaaagccagaatgctggccaggtgcggtggctcatgcctgtaatcccaatactttggaaggtcgcggcgggtggattacctgaggtcaggagctggagaccagtctggccatcatggtgaaaccctgtctctactaaaaatacaaaaaattagccaggcgcggtggcaggcatcataatcccaggtacttgggaggctgagataggagagtcacttgaacccttgtggtggaggttgcgtgagcggagatcgcgctactacactccagcctgggcaatagggcgagactctgtctaaaaaaaaaaaaaaaaaggaaggaagttagttttgcatcataaacagaaattggccatggccatgttggagctattccctttacctgggtgctctcccaggagccatggtcctcagccatctgtactgccttctaactcagaggcagtttctatttgtcaccacatttgctgtcattttccaaacagcagagttaagaggaagtgaaatgcctattttcttcatatacctattaaataagagaaaacaaaaattagaccaagccccattcactcatgtgagtgtaccccatggcccttttttcattttgtctatattattgagtcaattttaggttcaacaaatatttattgttcacttcataatgagacctgtgttaggcacatttgcatatcttatttaattctcctaaccgttatttgagatagttaatgatgatgaccatgaattcactttttttaagagatgaagaaactgagactcagagaggtttgtgaacacagctattacacagctattagccagaagagctaagtcttaaactctgacctggacaattctgttacatttatgtttactgtaacatagaaactttgccccaaatctcaaaagtattgcttctctattaaatgtcttttttaaaattgtcccagagaatagaaaatataatttttatatgacttagcaaacttccttcccaaacatgatatgaagaaatgagtgaaatctcctttaaatagacatctcagtctttctaagtattgtatgccagtaggaagaaggctagtattctccctaggatatgcaggccagtgtatacagatttgtctcacatctgggtgcagatctccttgccaggtgcagaatggggactttacgccaggtatgcttgttggtcattataaagttcaagtgaattgtgtataagtctttgtgttttcatgacaacttttttttcctgatgttcaggtaccaaacacagaaaaatccttacgtgaaaaacagatacagattcttgtagtaggaagggaattgcattaggggttggagttctggagtttttggtctaaccacatcctgtcttaggaattttgccatatcagttgttgtgaacctgttttctaaaaatgctgacaaaaatacatgtaataggctggacgtggtggctcacgcctataatcctagcactttgggaggctgaggcaggtggatcacctgaggtcaggggtgttcgagaccagcctggccaacatggcgcaactccgtctctactaaaaaatatcaaaagtagccaggcctttaatcccagctacctgggaggctgaggcaggagaatcgcttgaacccaggaggcagaggtttcagtgagccaagatcgcgccactgcactccagcctgggcaacagagtgagactctgtctcaaaataataataataatttttaccttgtaagtttacattgcctgggcaatactgaagaacacatggcagtgaaaaagttcttaatacaggggagcttttatcatgttaatgatttactgtcaccatcatgccctaaaatattactctcttcatggggtacgtcaaaatttcttatacgagtcacttagtgtgggtccctttgaaaaagcatgaatgaaatggcagggcctatgctcccagaggattggataactgctgcttaactaatgggatagaggtcatcaccctccctagtctgaagaatagagaaaacagagaagccagagtgtaggtagcagtttcagatctgggttatctccttatacttcctttagttctcttacattaaaagtaatttaacttttttttcgttgaatatatattgagcaggtgctatatgccttggttccagcagcaaacaaagtaccacattttgtcagttacatcagggtttctcaacctcaacactattgacattttgagctcattttttgttgttgttgtaggggctttcctgtgccttttaagggagttctgcagcatcctgggtctctacccactagataactgctgtgacacctcccatttgtgacaacgaagcctccctaaacattgcccagatgttcattggtgtgcagaaccaccctggctgagagccactgagttgttggatgtacagttttcacatattgatgtccctgtgatcggagcgcatcttacaactgatgccctcctgttcttaagattggcagtgggattcttcttggcttgtggcattgtacagcaggtggacaccgtgcttccatcgtcttcctcatttcccctagccccttctcagagctcacagtcagctggctgcagtggaagtctggggattagatgaaggtgaatttaagtccctctcagtttgaagagctctatgactttatcacagtctgaaattccccttttcacagggccagacagcctcgcgctacatgataatctgtttgtgagttcgagatcgttggattcattagggaatgactaggatagttgtcagcctctgctttgtcaaagtataatcttgaaaaaaaaattttctttttcaattttaatatagtctatcccactggaatgtactatcactggcaataaactggctctggttctttttaaagaaattactgttacgctgtagcatttgtctgtataattttagttattgaattaaaatcttttgggaccccaacaggatgagatcattggccagctggcttcctcccacctgcacctggactgaaattccccgtggcattagaggtgtttcgtaaggtgctccctgctgtctgtcctacagattgcagtggctctgctggaaaagaacggaattctatgcaagttgcgtgtgtcatgaaggtctctgcacagtgggtgtgtttctttgtcgtcttttctccactctgctcttctgtgaaatgtgccagcagtggacagaacaggggcagaggtgatcagtgaccattgcacagaatatcagtaagtgttgtaaggtatatagtcttggccaacaaattgtaagcaaaataccaggaacttcctaatctagtaggaaattttgtatgcttttgacaaacatctgatcctactgacactgaaagtccttagaaggaaaaacttgaggccaggtgctatggctcacgcctgtaatctcagcactttgggaggccaaggtgggcggatcacctgaggtcaggagttcgagacgagcctggccaacatggtcaaaccctttctctactgaaaatacaaaattaggtgggcgtgatggtaggcgcctataatcccagctactcgggaggctgcggcaggagaattgcttgaacccggaaggtggcggttgcagtgagccaagatggcgctactgcactccagcctgggcaataggaatgaaactccgtcaccaaaaaaaaaaaaaaaaaaaaaaaaaaaaatggaaaaaacataaatggaggtgagctggaagattgagtgaactcatctgagccagaaaggatacatctacaaatttttctgggagagtataatagcaggctgcaaacataaatatgtcatctgtacttaagtaattttgctaaattaataagatcaacaatggctaccatttagagaacacattgcataactaggcactgtcctgagaactctgaatataaaatgaatactgacagtgactctgagaggaggcatggcagcagacaagacggctatttctgtcccattaggtgagaaaaacgaaacacagagacgtgaagtggcttgcccaagctatatgctcattaaacatcactggtgaaatgagctttcctctgctcagccaactttcttgattgattgattcattcattcattttttttctttactattatctctctctttgtatgagactacaaattgttatagtaattgacttattgatacagttactaattatttaaacagcacaaaattaaaaacttggccacaatattattaacacacagctggggattaatattttgtgtcttcctcatacaatcccaaagtcaacttcaccttccctagcaataaataaaatcacactggataattttaaaattttctatcaaatgtgtgatcaagtctgtgctctgacagcaactctacaattggcaggagctgagaaacaaaatacattttttaaagtaataaataaaaatgttaattcctgccatgcctgtgaggtttgaagctgggaacagagaaggatttaatttagggaacagagaaagatttaatttagaaatgacttcataaagacttaggttctaattaagaagactgaaagaagagcatcaaaccccacagcctacattcttctgtgggcctgtttgatagtgagctctcctgccttcagaagtgccctctgtactacatagattgtgctgtgcatggttgaatttacatgggatgcctatctacaggtaaaccaagtacaggtatgatattccattccagtggatttagctccatcttgattttgtaaatgagatgccaaaaatacctgtgttcagtaattagtgtcgctttctgcatcagtgtgctattttggcattgctctcttctgttgcagaaatttgaagacatctgtttactttcaactctcagagacctttttaagcacactgaatttgtagagcatgagcttgttcttatgttagagctccttacggtatcttccctcttctagaactttttaacaaaattattgaaaatcagtgaaaacatttgaacaaatttagacatggtatgatgagaaatgacagctcttattaaaaggaagagtgttctgctaaaatctcttcttgggggatgtatgtttggggttaagtaaggaagagtttcagaggtttccagcagcgatgtaatcctttatagaaaaggcccatcgttcttttaacaatagccaaagtggaccgaccagggtggcagcgttttcattagcaatgataattagtccagcttaatcacgtgggcatttgagcttttgatcccatgctaatttgtggacctgcataaggagataaactaagtggactaaaggtcagttttgtggttggcctgtgtaatgagcatctgttcaaagtatataaaagacttgtttaaaaattgacaacaatttatgaaaccagttacaatgtaaaggatggtacttaatttatacctgagaaattatacatacaaaatacgtgacataaggaagggttcatttcagcagcaatggttctgaccggtgccagggcaatatgggaatgataaattgagataaagtgcacagagtatgcagtgaaggaatgtcagtgatatataggaaatctgaagctttggaggttgcccagatggaggtgacttgtatccgttaggatttattcaggcatgtataacagaaaagccaggacaagcagggtggaagcaaaaaataggaactgattgactgaagtaactgaaaagtctggggctggttctggcctttggcttcctgcctctgcctgggttggcttcctttctaggcaggccctttcttcgtggtggcccctggcattactgggctgaaatcgtcttatagttgcaatgccaaaggaacaaaatcttctctccctaaaatttcttgcaaaagtcttatccttggaccagtcaccgcatctagagggaaaaacttgtctaattgccaagtgtgaatgtctgcctgcctcctttttcagaggaggccctgaccagaccctgcttgcctttcagaaggactgaatatggaatgaggggaatagtttcttaaaaggaaatctgagtgggtcctcagaatgagaagaattggtgctggccaggcacggaaaacacgtatcccataggaaatcaagaaggaaactctaaggccaggcgcagtggctcaagcctgtaatcccagcactttgggaggtggaggcgggtggatcacctgaggtcgggagttcaagaccagcctaaccaacttagagaaacccggtctctactaaaaataaaaaaattagctgggtgtgttggcacatgcctgtaatcccagctactcgagaggctgaggcaggagaattgcttgaacccaggaggtggaggttgcagtgagccgagatcgctccattgcattccagcctgggcaacaagagtaaaactccgttttacaaaaaaaaaagaaggaaactgttgactgctcataaatgcagtcattcactccctcatccttcctaccaagaattattgagcacctgctatggccaggcattgttctaggtgctgggaattcagtagtgcaccaaacacctcaaatttctttcttcatgaagcttaaaacatttttcatgctagtgttatggggggcggtcaagggtgggttatgtcctccagatatggagtgattggttgctatagctacaataaaaggcagaggggttgacggattctgtagtgggaaaagtaatctagggaacaggagattctattagagaaaaggaagggagggatggagagaggtttgaatacctccaaagtggagtctgactttgggtacctggagtattgtatcaagcacagagggatttagcgtaggtgtgtaaagagcctttttgttaattgggagtgagagttaatgtatttacctttgagaatgcagtcatgatactgtgttattttagatgctttgcctgccctggaagaagcactgagttgatgatctaatagcttgttaccactgttaatgtctatgattatctttgtcacagtgggaatatagctgtcagggaaagagaaaggcatttcttcttcactttcagtaatcgagctcaaactgctgacactccaaggaaaagagagaaggcacttaacaaaaaagacaagccaagaaaaaaaaaaaaaagccatgggaccttagcatgtgatggcttttaatgggaatgctcagatggtcttgccaacggcctggttttcgtcaccaagggattagtagagtatgacctgatggcttaaaaaaacaactcaaaaaaaccaaatcaaccaaccaaacaaaaaaaccaggtgtgctggggtatttataaccgaaggaaaatggatttaaatgaacagatggaaaaataaaaataatgcagtttttcttgttgatggtagcgtaatgaggattaaataaaaatgtagccttttatgttttgaggggtgcaatatgaaggagaggctctgatacaggctgtctctttaaggaaagaagcaacaaaaattaattatgtagaggagaatcagggtcttgagcattggtggtggagaaaccacaattgaagtgaggctttgggtagcgtttactatgtgccacatgcctcaatgagggtctagtatattttaccttttatgcaactcacctgcctggaaaacagtattgtcctaatttcacatgggaggaatttgtaacagagaggggttaagcaaccaagtttccatgactgtcaaatgccagctcaggtgctgaaacctaagacattttttccccttcctaagcctttgggtttctgttttgtttttaaagcctttggattctttgttttttttttttttgtttgtttgttttggagaagaagtctcgctctgtcactctgtcacccaggctggagtgcagtggcgtgatctcggctcactgcaacctccacctcctgggttcaagcaattctcctgcctcagcctcctgagtagttgggactacaggcacccgccaccgtgcccggctaatttttgtatttttagtagagactggatttcaccatgttggccaagatggtctcaatctcttgacctcatgatccgcctgcctcgccctcccaatgtgctgggattacaggcatgagccactgagcccggccaagcctttagtttttaatcactgccttccaggcccctcctccagaaaaatccctgaatggccttgcattactagtaatataaagttttaaaatactttgtgtggcttacaaggtcctttttagctttctctgggagacagtttccaggcctgtgctgaattcttttgtctttcctcacattcttttcccccagctctcccccatctgactttctgccatcttacttacttcctcttatgcccctgcagttttgcttatacctgtgttatgacacctatgcctccaaattgtctttttctgaatgcttgattgtgagaacttctgggagttccagtcttgtggaagttgtatcttatgttttttgcccccatgattttagacatagtaggtgttcaatgaagtaaatgctgaaagaaaactataaatggtaggtttcagagggttaattgttcttggtatttctttcagacagaagcccagaggaactttaggagcagcaaccatgccttaaatggtttttttttaatacatttttttaaagcattggttataggttctttctgtacagttgtgttagaggcagattacatttactttcttgcacctctggtaactggataaaaaaactctttgttcacctaagaagtcttgcttcatatttgaactggctgattcgaccccctttagtattttaccatgtttatgcctgccacaggaaatgtgaaagtgagtgttttttgatctttatgtttaaattattaatgtaaagtcaaaactgggaagagagctcagttgctgcatggcatatacgtaaatattatcctatttgaagaacgggatttctggaaaaactcatggggattttgcagtaatcctatgtcctgtcatgtggacaagtatttcaacccagctgtccccaagacatgccatcgctccctttcagcccattggctctgtggaattttcattgcaggaacatggaactggttaaaatatcattttcgtaagcagtacaagaagctgtaaattgccccctagctcttaaagacagtaagtcattcattgttagcagtgataatgcatgcctatacagattttaggagtgtttcagttctgatctttcatgttagaaaagtaatctcccttcccagttgaactctttttcctagttactagaattggaagtggcaatcacttctattccagcctgtccagtgttttctgctgaaactatttagaaagtgtgatgtcctaatgggacctggctaacttcttgaactgtagcttttaatgttcttggttttgtaataatctcatcctttcaaaatttgcttgaaatttgtgtttctttgacctctggtagactatactttggtgccctttgtagaaagattttctttgactcaatattgtagatagttcaggcaaccttttaaagaagtattcttctttgtatggttctaagaattctttacacatttagttctggattatttcgtgggaagatggctcccaatctgctctctctagtctccttgagggcagaggactcccctaatttcctgtgtatttccagcgcttgtttccgtgtctggttctgagatagtctacacagagtgttttttggggaatgtgcaagggtttcttcttggcaacaattgacttctactgttttacaaagtacagagaggctgtgctctgttgctgatggggttacttgattctgtgaagtgctcttttctgactggtattagcaagtaacgcaaacccaaattttaaaaatgatagaatcggcctggcgtggtggctcacgcctgtaatcccagcactttgggaggccgaggcgggcagatcacgaggtcaggagatcaagaccatcctggccaacatggggaaaccctgtctttactaaaaatacaaaaattagctgggtgtggtggtgcgtgcctgtaatctcagcgacttgggaggctgaggcaggagaatcacttgaaccagggagtcggaggttgcagtgagctgagatcacgccacagcactgcagcctggcgacagatcgacactccacctcagaaaaaaaaaaaaaaaaaaaaaaagacagtatcagaatcccagtcttcctcagacctcatatgtggaggcagtgcatgtttagcaaacctggggccctgggagccaccactgactgttaggaccactttagtgcctgtgctgtaagccaggattttgaagttcttgggggcaattttgctttaagcagtgttagggaactctttacaggtttgtgagctgggagtgacaagccattattttatccacaccaaagctttgaatgataaaggggttgaaccactgtcattcattaaattcattaactgttggaattcctctaaggatctatctgcaggccccttctcttctcactctgtacacggtctccccaggcaacttcataatggctaaaattaccatctattccaagagcatgctcaaattgatatttctggctgaaatctcccttttgagattaaagcccttatcacctacttcctccttgacgccggagttctcaggacaccttaaaaccaagttcagtatctctgcccatttctgcttccttacctttaaacctgttcctcattcagtcctttctgtccccaggagtggcagaaacataatccatttgccctagcctcaaacctgggatgtctgtcttcctccgtctacaattaatcatcagccagctcctatcagtgtcacttgaatccatattttctcccctactcactgccaccactaaatagtaatctcttgccttctgtggaagctgtagaacatcgcttcaagtttaccctcttgtgacccactgttgtctacacagaaaatctggaggaacctttaaaaatgggaatatgaatgtatcactcctgtgtcagtaactattctgggaccatttttgtggcttccaataggtctcaggatacatcctaggatccagcaatgacttttcttaatttctcgccctttctacttaccgtgccccaggtcaagcccacaattttccctacacctactgctgtctctactcagaaacgctttccctcctcccaacctgcttcacctggttgaattctagctcctgtttcagaagcttagctttaatcacttccttcaggaggcttttcttgcccccagctaagtcagagccttactcttctcccacccacccttgctctgctactgacaatgaagaattgcttgaaaggggcaaaaatagagagaaactagatactgacacaggcacgcaggcaaaaggaatggttagaaaaaaggaattgctggtcaatttcgccattattgactttgtcccttggtatttaaaaacctaggcaggtcccctagtatcagtgcctctaggaacgtgagcacttctggatgccgggcagcacttctaaaggttacctacgggctccctagtaaattaaggttgtatattgcaatggcaattaagcagtgtaataaatgtgattgttgtggtggttctatggggaggggagactcttcccacaggctgggttcctttcctgctgcttgtctaattaacataatttctagccccaaggctcactgctgcattttcttctccaatgtagaagggtgatggagatgcaccttccattctttcagcacgtcagtcatactaaactacactctgtgagggccaggggaaggaaacaaaaacccttctgtgtatgtagagtaagaagttctactctaaagcacaaatgctccagagaaaatacaagggagtgtattttctgctgctgtacaatctgctgctctcttcagatgctttgacctgttcctatagtgactttgtcacatgattctgaatttaaggatacatctacttcctacataagactaagttgcaaaccagctgcaaatatgtagtactcccttggatgaagagtgttggattggaaatctggggagaggacagactcattggtcttccagtttgttttcctagagatttcttgagagtaattttgacgatgccctgcttggtttcatgttacttgctgacttcagcacctaaatcccttccctgcccaacttcccgcctccaccaaacatactggttccttactgaggtttgaatgtaggtttgaatgtatgcatggttccctgttaaagttctcttgtttgaggttcattttttaataacccttggcagtgtgctgggaaatgtgttagtggtattagtggtggtgtgctgggaaatgtattggtggtaaatttgtatatgtttgtttaaagatgagtgtaatgttgagagaggttgggctggtgatggtgttgaaacacaggatctcagactcttagggctggggaaagctattaataccatctgctctcatcactttgatgttctgtatagggctggtttgtagagcctttctattagatgaggtaagcaatagggaccttcagagattcgtggggagacgtttattctagccctgaaaaaatggcacagtatgagctggcaggattggagagaggaggctagactcaagcgaagccagggggagaatttaaggtgaagatttgtcagacactgacacttgtaagatacttcccttgcaaaaccgcatactacatccattatttttccttaagttatagcagtggtccactggaaatgttttgtggtgatattatgggaattctgcagcataaggatgaacagatgagaatatctcaatgagatgtggagttggaggacttaacaaatcagatgagaaaggacaagcttgaagacagatcagtttaggtaaaagtgattgcatgcatgtgagtttgattgaacagtaccaacatgtcctgagcaagatgggaaactttcctaataatcatctgatggaatcaagttgtgataaattgttatcatcatagtattatttcaatttaatggccatacataatggcatctcccagcaattaatctaacattaacctccaccttagttattgaatgtatactgtggtttaggctgaaaacatgatggataagaattactgactgctttggatctgtatacgatatgtcatagccttgaactttattctgttctgcttcagtctttttcagaccttcctgtacgaacccaagtctttattatttgtgacccaatagcatgttagatgtttttaactggaaaatgtgaatggccactttttttttctcttacgcgaagtaaatgctatgtaaattgatttttaatgcttttattgtcccacaggaagataaaaaccattagctaatgacaatggtaatgtttaaatagtttttaattttaaaataatatttgtaacctgcaatgctatgctatctcattttggacttagcgaaaatgtgtgagcatctacagaaatgtatgtgaattaggctccaggaataaaattgcataaaagtacaactgtggcttaaatctatttatatgtatgcttggatcctgagcaatatagatacctggctagaaacctggctgttccattataactgaatgtcaaattccccacagttagtcattattaaaaatacccttgtcttaaatttactttggcacgggaatgttcttggtgattaccatactgtgttactctagggagttaaagatttatattatgtttcagttctactgaaataatagcattcgtaggcacacagatatctctatgtgtatactgatatacttgagaaagttctcctttaacaacaggtgattttaatattatctgaaaagaaataaaaatactttgtttcatagcactgtggagtgtcaacagaaatcttatttgttctttactcctaaaataggagtataacacaaagtaatatgttatgctcactaaagaacagaatctcaatttcagagatagaattgccaagttcattatttctggagaaaggaacaaatattaaccccttagtttaacctgaaaatgaaagagcatgtggactaaggggaaaaaaattatatatatatatatatgaaaaattgacttttctgtcttttagttgtatgtctttatctccaacagatatgtgattatcctccagagaggaccatgagaatttatttttaattttcattccgttaattacttgtgtaacatatgtatgtccccataacagccagtgctcactcgcgtgcacgctgtctctctctctctctctctcacacacacacacacgcttactacatattcatacatttattctacagggaagaagagacagttggagacactaatattccagctgtcggcagcagaatcatttcacaaccttcttcccagaacttttggtcattactattcttgcccctcagcctcactactcactgaaaaaatatttaatgtggatctagtcagttccagtttggttagtttaaagagatccaggaagactgagcaatcatttactaatctgtattctaaaaaaccagctcaagaattaattcaattagatatgccagtcaccatatctggagattaaaagcaggcaaacagaagggaaataaggaaaatgaagcagggcaaatgggactattactgatatattaaaatgaaagactatactaagacttctcatatgcgtatattgagatttttcctgctggcaatgatcaagtacaattacataccttttgtatgacatttctgattggaaaggttatgtgacatgcagggaggggtcttagttattggctctttagctatttccctctttatcctggaatagtaccacagtgtgtttttcactcctttaaaacattctttaatgaaattgctttgagtcatccctgtctctgtgctttgcctcttttattccattgacttgtttagggtacataggaaattaggttgaaaatgtgttagtattccacattaatattaacttgaagtctttcccttgtatcactaaatcactacagataaaaacttgtactgtgaatgcatgctgcttgtctataaatatcacctgaaacagcaaataaagccatgtatgtttaactgagaagagttgagaattaatgctaaattaaaatattgtcacacagattaggagaggcatacacacacacagtctctgatgcctttctctttactgtgaacactgaataataattatttgacgaaggtagtgcgttgtaaatatttataaacagaaatgtaaaacagtgagaccacagtgaataaattattttgaaatattttaaaatccagtttttatatgctttttagtaaaaattattcatggtgatcaatatttctttctcacttgccatctgctccacttctttgcctgtgcagttctaggtgaatgatgcactgtgctgtataatgtactccacaaatttattgacttggatgcagcatttttatggagagcaggcaaacatgtaatcactaaacacaagtcttctgctgttgtaattgccagctccttcctaaccacgggaacaattaggtgatcattaaatggcttccaaggggatgccttcctctcctgtcttactgctggtgtcatttagtagcttctgcaggagaaggtggaagaaatctattccacgtagtcctggagtgactggtcaaaaggatttcatcttgtgtcttacaggcaatttgtgaagagcccctgttttcatgcgattccattttaattcagttgcagcatccagttttgcactattgaatcaccccacttgaaagcctcagagaggggcttttgggctgaaacaatgacacttaggtggtttgaccacccctttcttagtctgaaagcagatgtctgtatccacttactaacctgtgactcttgtgaaattttccttttgttacctggcttggagcatttgccttaatgaggtttatgtatttttctggtttgttagttatcctttttattcttccaagcaaaccatgttagactttattattattattactttaatttctgcctgtttaggggctagttacaaatattcaaggacttttcttcttttttttcttttttccttttttttgagacagactcttactctgttgcccaggctggagtgcagcggtgccatcttagctcactgcaacctctgcctcccgagttcaaacgtttctcctgtctcagtctcccaaccagctgggactatagcttcgtgccaccacaccaggctagttctttttgtatttttagtagacatggagtttccccatgttggccaggtcaggctggtctcaaactcctgacatcaagttacccacccacttcagcctcccaaagtgctgggattgtaggcctgagccaccatggctggctggaattatcttgaatcgggtaaaatcatagcaacctagtaatgctgcctgtaatttgaagacacctgaaggtcaagggttcttaatgctgcctctcctatgaagccatccctgattctcttaatttaaattaattgccctcttttatatgcctccatagttacaggttttttcttttgttgtgtttcatgaatctgccttacataagttctctttatgatcatctttcctgctgagtggcaaagtcttcaaaggtagacattgaatcttatctatctttgctttcccctgctgaacacagaatatacactttataattaattgcttgttgaattggagatagtcacatttttctaacctaatgccctataaaagaactctcattgtgtcattcaaggatcatttagtggcaagaatggaaatccacacgaacttactttaggcaaaggcaggaggttctttggagaatacaaggatgtctctcacactcaaggctgggcagtacatctagccaggactcagtggagagaggggccacttctgggaaagtcctaggagccccactcctgtgccgcactcactatctttctgtctcttggtctgatggtactgctgtaccatggtaccagcatctgtcagtctgattatcaagctttttgttctctttcattaagtaatgacttaccaggaatgctgctccctccggtccctgcaaatctaaggcctcaatatgactagttatgtgttccaatttcagattccctgcagagagaatatcatggccttctctgggtcaagagtccacctgtgttagcttagccgaggccctgaagaaaggaggacatctaagagaggctcacctgatttggagaactaccctgtcctcaggctcccaagccagcggtccccaacctttttggcaccagggactggttttgtggaagacaatttttccatggggggatggttttgggatgaaactgttccacctcagatcatcaggcacgtgcaacctggatcccttgaatgcgcagttcacaatagggttcgctctcctatgagaatgtaatgctgccgctgacctaaccggaggcggagctcaggcagtaatgctgaatcctgctgagtgtcttggttcctaacactaagggatgggtttggaggagcagaaatgattgttggaagcaagtgattggtatctgcatgcaactgtgccgctcaaaggtgctggagaatgactaatttgatggaggaaaatagcagtattagttgtggttttcttttcaaaatttcttatgttcacaacacttgtgttttgtcctctgaaatttaccctctacaccctaatgcttgatcagtgtccctgcctgtgtgagaaaccctcctggaccactaaagcccagtgtcattttgttcttctttgccctttaagagaatggtacattgcattcattttacatctgcttgggctgagctctgtcctgcccctaacgttctgtgctgttctcatcgttgtcttctcctctgcagcttctgttcatgctgttccatgtgcctggaatgcccttcccctcatccttatatatccatcagagctcagcttacgtgccaccttctcaggagtcgctgtattctgtagggtctccttgatatttttatttcacattcaattatcttatgttgtttttcacaagctgcatttacacaagtttgtgttagtttacttgcttcatacctttctcccccactggaatgcaaacccctgaaggctgttctgccttgttcatcttggatctcggtgcttggtatccagtaggagccccgtaaatgtctctttaatgtgcaactgtctggctgtcatgcatctcctggagtggtggcatggcctcttcttcttgaaatgactgaaacggaaccctttgttaggccatctgtatcagggtgataaattccctgtttgtgtagtcagctgccctgccaggaacatggcactctgtaatgtgcataatataatcatttagcttttggggtgatttttctgcatcatttgatcaagtcataaacctaagttatgaagtctactctggagactgagcctaagtaaaactgatcaatgggatctgtcttgggaacaagaaatttaatatactctgcttgacagccaactagagtcattgtttttccttcctaaatgcagatctaatcatccagatatgacaagggtggggttttttgatgagtaggttaggcaattttgtcccccttgcttctggatcagaagacaagatggttttaggctggttgcttttgtcattaagtaattatagctttataatgggtcttggggagtatcctgcattcctgtgttctgaccactgtcccctgtactcccctgtagctcagcttttgaatttcctaaaattaaggcaatgagtggtatgtgtaaaatcttgcattatagagactgggctcaaatcctagacccttcactgatcagctgtgttaacttgggccagttactcaatccattagcctgcattcttcatttgtaaaatagggataaaaatgttttgtcttagcagggatctagtaaggcttcattatgatgatatgtgttctttgcacaaggccaaacaggcagtaaagtgttaaaaaactttggcatcaacatcattcccattatcatcattatctccatctctccagtaggaccttcagaagtgacactgatgttacctggaaggaggggccaggaaggggaaagggtgtgactaatacccacaaacattatcttaggcagcataagtttccagaaacatggattcacttattattcattggtttgagttcagcttttcttgttgtttccaaataatacctttagggttgaagtattagggacaggtgtgtatgcagttttttctcagcagtggggataaacatgtggttgcaggacacacaggcatcttaaaattcggacttaattaaataaatgaaaaataaaccatttcacttcatttttctgctcaggtcagattgatgtctgttttcttagggtaattgtggcttgatgctctgtttggtcccctaaataagaaagtttaggcacatcattcctcaaagatcagatattccttgtctggaagtcttgtttgtttgatcttcagagtattttaaaaatagaaacagactgagaaaatccagccatgcttgaaaaatcttaaggtttccatggatctacattgctcagtctcaaccagacactagaactgagtggaagctgctttctttagacctgtcattctcaaattgtggtccctgggactaacagcatcagcatcaacccaggggacttgtaagaaacacccatttctacaacccatcatcccaaggcttttaaatgagaaactctggggtgtgtgccactgtctttatcaggccttccaggtgatgcgcatgtggctagagtttgagaagcattatttcagacacagctcgggctctgcactccccagttacagttctttgcccttctttgctgtcttacacccagctccctacactgagttaaattgcctccctggtgccatgaagtatttttttgtctagggactgctaaggattttagggttgggttttaagtacgttgatttctcttctgcgtcaatatatctgacaccttaagctcacttaagtcccttaagcttctctaagcctaagaaatacatggtgagagggatgtgtctctaagaatatgtttaacattgtggaagactgttgacagctgtgttgactctcaagacaagatcaggataatagactgtctaaaaggaatgtgttaattttattgcttgaagtataagcatatcaatttttcttaattatgctagaaatggtggtagtcaggtagtcaggttcacctagttgtgaaatctttcctttgctcctgtagttgcatggcttgagggaacatgtttaacctcttgagtacaactttgctcatctgtgaaatgggaattacataacctatggcaaagtgaaatggggagagttaagtgtggcgtgtataggaaaactgttcctttgagttcctttgctattaaggctcatttttttatatccacagtcacattcatgaagcttttctgaagaacaaacacaccctttgggaagtatagtcaaaagcgggaacgtatttattgagtaatcaataagctatatattttgtcatgtatgaattatgtatgcattatttataatacctcacacatgaatcatacttatagtaagcattttttgaatgcttagtatgtgtcaggcactgttctagaagctgggacaccaaagagagctgtttagataagatctgtgtttttacggtactcatattccgctttggagaaggaaagggagacacagtaaacaagtgttatgtttatttttttgtttgtttagtcatttagtttttgtaatttaatttttaaaaatagataatacatgtacagcatttgaaagtcaaaataatgtaaaaaggtatatgcagagaagtcttatttccaccatgttggtgaattctatattccgtccccaccctatcctcccacaggtaaccatatttattagttttcgtttatccttccagggtttctttatgcaaatataattaaattatatatgttcgtaatttctgccttaataaaaggtagcatactatacatgctgttctgcacttttaaagtaggagttcttaaccagcataagactttaaggggttattaaacatactccctcaaggttttaaataccattttatatgtatctgtcaataactttcatcatattttcaaagtcatctatgacccccaaaaagggtaaaaatcattatttcataagagtttacagattaccagatacctggatttgtaacaaaccatgaactgcagtaaaagatatatatggcatctagaaaaaaaatcagaaaaagatgccatatatagaaaaatgcatttgaattaatacgcatttagtgaattcagtgtaattttatgcttttatacttgcggatgctagaaagagaaaatatttatgattaattccttatgagactaccaagttaagtacttacaagataccaatgaaatacatattaatccacattagaatttaaagacagtattttattttcacaggtctctgttgtatcaagtataaatgacgaaattgttaatagttcttacaacttgtataagtggataatttgaactgtagaatatactttgtagaagatgggttttttgttagtttcttttacctaaatgaacatattcatgacaagttgaagccttgatctgggcttgtcctttgggagaaaattaaatcttaacctaaacaatggaaatactaaaggaatgcttgttgaaaatatgtgcaatatatattttaaaaaaaaaagacctcagaaggcaagggtatatttagaatttggtagaaattttggtatctgtattctaaacatgtggtttcagtgtacaggtgatatgtttaagtggatgtaatttaacagtattctttcagatagtattctatgcagtacctagcagcagttgctcatttaatacatgcagggaacacataagtagctggaaaacaaacttttatcagtgtaagtagaattgtctcatgtggaatttgcttcagaaggtatagagcacaatggttaatgtgttatcttttcagaaacatagaactaagttgatgggaaagaggggacaattttactctgtaatcactaaagtggtttggagactttcccaaagatattggcaggatggctttataacataaaccatgacttggagaggataaaattaatcagtaatcttcactgaagtataaagtgtgaatgaggcgggaaacgtcatgggaaaggagatcttttcttatggactgggggactttctcagatggttctctcagcactgtcctctcctgggtggcattgtcacatgcatttatttattatggggttatgagttaatgacccacctccattgccgctgctagagcaaaatgttagtttgagatcaaaactctccatcaaacatagttgaattccaaatcgctgaactgcccttcactagaagggaaagtgatatgacctgttctgcctttctccaggcacctataaagccaataattctccattcatgtgaagctcctcttgtctttattgccttcaccacttttttccactctttattatagttcctttgtccgtccttgtgtcgtggttttacacgcgtggctcagcctgagcttcaggctttgttctctctgcttttttatggcctttttgatgagtcgctgggtagttccaacccactctattgtcatttgatcacatactgtctcattgacctagaattttagaaggaaacgcagtctagattagtatctctttgaattgttcagcctttaaaaaaaatccaatcaaaatgatataattttgtagttagtaaagaatccggggccgggtgcagtctctcacgcctgtaattccagcactttgggaggccaaggtgggcggatcacctgaggtcaggagtccgagaccagcctggctaacatggtgaaaccctgtttctactaaaaatacaaaaaattatccagacgtggtggcatgtacctgtaatcccgtctacgtaggagtctgaggcaggagaattgcttgaacccgggagacggaggttacattgagccgagatggcgccattgcactccagcttgggcaacaagagcgaaactctgtctcaaaaaaaaaaaaaaatccagaatgactacagtgttaagctacggtggctcacacccaacatggtgaaaccccgtctctactaaaaatacaaaaattagctggacgtgctagtgcacgcctgtaatcccagctactggggagcctgaggcaggagaatggcttgaacccaggaggtggaggttgcagtgagccaagatcacgccatagcactccagcctgggtgacagagcaagactccgtctcaaaaaaaaaaaaaaaaaaaagttaagcttaaacccttagggtggacttactttaatgagcagaaaatgtgtgagttgttcaagagtgttcttctaaagcacttgcaaaaatagctttgggtatgctcattcattcattcattcttctacaagtatttattgtggtccaactgtgtgtttagcattgggcaataataatggctaatatttaacacgtaacatgctcactatttgcaagacactaagcatttcacctcatgtaattctaagagttaggtgctgcaattattctcattttgtaaacaaggaaacagatgaagagtttaggtaacttgcccaggaccacttacatgccaagtggcaaaagtgggattctgtggtctggttctaggattcatggtctttatcactgtgctatgcatgatttctttctttattgaacttgtcatctagtcagatctgacccgtgcagttttgttttcaggactctcaaagcaaacttttctttcatggcaaaaacaaatctattctagctccatctgcattaccacagaatccagattagtagatttcaaaagaaggaggtttaaccatagctactatacctccgccctgaatatgtgacttgcatgtcaacaaggtcttccatattgactgacatttacatgtgatatttggttatcgagtttaactaaggaatcatctcgcatgcttaactatctgctggcgaaatttttgatgctgtggaatgtgtcagcgccagtggagtattataagttaattacttgtgtgcacagcaggcaacactgatacaggtggcctctagcaatgtggagatgagacattacttgagacacctgagatgtggctgtgagtgagttatcctgatgagtggggaatggggaatgtcaagaaggccaagtatggctctgtcctgatggaatgttcattcagatggaatgttgataggttgtgaaccataccattgttttacaatggggtgtgctgatgtgaggttgccttctggtggcccaggtagaactatgtgatagggattcaggatttataattcctcttcaataacatgcaaaacatgtaaagatgactaggacccactgacttagttttcattcattcgtgttttttttttctcactttccttattcaagaatgatttgctgggtgtttattatatgccagtactttttgctacactctgtgggaacaatgggaagccaaatagacaggtggctctagaatttctatataagattctgccactgcagagtgggtagaagcggatctagttggatttgtcttgaatcaacactggcatagcaagcactttgtttctgcttagcttgtacatttattaaggccactttgtttttgcttagcttgtatgtttattaaggccactttggccgaagttttctcctagccatttctgccataaaacttaaagttgggcttgtgagaagcaggacttgtcacaaacagcattggcttaatttctttctagtggatcagtgaaactcagattggtgctcccagagaaaacctggttttctgaagtgtatgacaaagtaaactaatctggaatggtgggctcaaggaaaacttcttgaataagtgacacttctgctcaagtttgaaaatggaatacaaagtctaggcctgacctggaccattatgagatcacacatagggcctattgcagttatcacaggccttatctttgtccgcacatctggttgggagatgggtctgtcagtgggggcctctgattgtgatttgatctcttgcattgaactataaaggcttttttaacaaactaggcagagtcgaatgttaaaaacctccattagaaacattttattattactcattttatcagcaagaccttcagttcatctcacctttttcaactccttaatctccattctacttgtcagaagtagtaagaaatattaacccaccataggaatggtctcacgcctcatttcaaatgttagtaatgcatcaaaaccctaagacttatattaactgcattttagatgtctaaattcattcccttactgggaaggaaaggtatatagttaaaagcagaaaagggctaatggcataataatttataatcatggtgttctgattagaaatgagtgacattcttccaaatttagtgcatgtaactgccactgaacactgattataaatttggctaatttgaacaaaggctttccttgttggttaagacagctgtgtctatctttactattgttgcagtaaaacattttaagtggaatttctgggtcaaagtgaatggatgtttttaaagatgtatatataaacaaaagcttgtgtgtgcgtttgtgaatatgtatttgtgtatacacaactgacttctagattttctctagtaaacatgtaaaataagtatttttaataataataatagtatgtgagtaagtttagatacaaaattttggtcctctggcggggagataaaggaggggaatatggatgttaaaatatatcaagcacgtcttattggaagttgagaaagaagagagaaattccttacagtgacatgttactcttccatgaaataatgcttctgacattaagctaaatggatgatgtcattttggccataaacaagtactaaatttggctaatacaatggtctgaaccattaaatgtaaagatttttattttgtcaagtgtggtgtgatggtttatgcaatcatggatatatgatttcatattctgcttttttttgcttttttcatcatcctttcacttactaaatggcttctatttcagagctatgtcatattccatcagtgagtatagacttgcattgttggacaggcagtttgttcatccctttttgacgctaagaatatggatatgaagcccatctgtgcataactgttcctttgctgagttggattttcttaggttcttagattcccacatgtagactcattgggcttaagtgtgaaaattgataaagttttaatatatattgtgagaattcttccccaaaatatttgtggtaaattttagtgcctttggcattatctgagagtgcttctgccattgtatccttgccactggtagctttttatagatctatttgatatagatttcaaactaaaattccaggtaaaattaaggtgctaccatttgggggttgactttggcctattcatttaagccctctcaactttactttcttcatctgttaaatgttggatggaggaggggagggaatgatatatgaggatgatcttgatgatatcactgtatcgatggtgatacttcatgggactgtggaaagaaaatctgtgctatggcagttggtcaactttaaagaacatttgtagggtaatgattctcatagctcacctttatttaaacctgtaagttctttgagacatggtgttgtctgtactctgtacattttactgaacagatgatgtcacgtataattaaaactaagagcacaaacttgagtctcagattcaccagaatttgtactcctactccatgtgagttaagtcctgcatgtatcagtttatacatccttattatgggaatgtagtactatatttgacacagaatggggtgaggagtaaaatgaaacactacaggccaactgcctggctcaatgagtggttcattaatgatagttagcaatggtgacagcaagagtggcaacaggtgtgcacatgacaatgtggtctccagtggagcagagaaccttgtccctcaacaatgttccaaggtaccttggatgcagagctcagtacatgtaaggtctggggtagagggaaccttgaatgaatatttgcatcaatgaatatataataggagtagtataacaaataatttgtgaatgaattaatttttcttcttggggaattttaattaaagacatgaaataatacaatcttttgggtacacagtagtcccgtacagaattgtatgatacacattatccttttcagcaaaaagtattaaagaagttggagaagaggcagtcttcttcaagggcaagagggatagtagatggtgatccaggagtaaagtgaggaggtgaggtgggtctgggagttggaactggcgccttttagaaagttttttccataaataacctacagactcggtcaccctcagtccctgcatcgtgcatggaccctggtgtgcacatctggtcattgggactaaaacatttggcacctatcagctgcatatgtccaacctggggagcgaatcacccggcccagcatccctcaagacatgataggggaggagggatacagcgataatgattttccccttggaaagctgcactgggtagatggtacacacccatgtcctttctcaatcacactggtagaatagattaatttatatggaagtacaacttaatatgaaaccagtgaggttgttttttagattaatacgtttcaaaaagattttgagataattttgagttaaactgtgaggcagatcaatcttcagccatagatagattcctatcactcctttttagcacaaataattgttcatttgacatcagtcataaatattcttaagcaaggtaatgaaatgccacttttttgaaccatgtgagatatatcttctgattgtgtttccaatgtcaactcaagttaatgtgatttacccagagtagggtacctgggtagctttttggatggcattgagaaactcatgaggagaaggaaagaaggcctttaatttttttgtcatgttctgacctctgtctgtgttttagtgtcaggataaagaccatacttaaggaattttcctttcttctttgttttgaaaaatcactgacaaaaaaatgcagaaaacacagggaaacatctaaggagggctgaagaaaacacagttgccttattttcaaatttggtgtaaatgtttgctagttgtagaagctaatttaatagcttcatctgcaaattataagtaatacttgacaaatattcaatatgtgttttgctttgagattttagttgttaatatgcaacacattacctataaatatgcaaggggaagaaactctttgggattagaaggagttgtttggaataattaatagtaaaggtaggttagtagtgatggcttaactgtgatttttttttaagtggatgttcagaatttatttgaactcttaaaaaaattctaggatctagatctgcatcttaaagtcacatttaattcttcttggctttgaacttggtacatctgcagtggtaggttaggaaagaatcacccaataaaggaatttgaaccaaatgagttcataaatgggaacttatacctgccacttattcctgacaccatctaaaatcctgagtttatgaaccaagtgagtccatatatggaaagttatacctgccacttatttctgaaactgtctaaaatcctgaatttaagagtgtaatattgcttatttattctctattctgtcaatatttcattgatgccccagtgtggtttgaatattagtgatggtagtagtatcagggaggacttcatgtctttttttctgaaacggaatgtcgctgtcacccaggctggagtgcagtggtgcaatctcagccaactgcatcctctgcctcctgggttcaagtgattctcctacctcagcctcctaagtagctggattacaggcatctgccaaccatgtccggctaatttttttgtatttttagtagagattgggtttcaccatgttggccaaggtgggtttgaactctgaagcgaatagaagtaggcttatcatcatggaagtacttacctggccatatctgagtgaaggacagttgaagtacttggtctcattgggaccatgtcaagatattccaggaagaaaatccttttctcattttgtcaaggcaatactaggaaatcagtatttgtatggatattccatatttttgattaaagggccggaatcaaattctacttatttccattgctcttacagtgctgggtaccatatttgaactaaaactcattatcttgtaactaaaggaaattagaggttgatgagtaactagtccatgagcaagttgcttcaaaactgttcctagaagtttgactacattttataacaagagaggagatgtcacataggtatacttccagttaaaaatccctcttcggatcatttggtgtgatggaagtgttctgaaactagattgtagtgatggtcgtacaactctgtaaatttactaagagtcattgaattgtacaattaaactggttgacattaagcatatataaattatacctcaatagagttgtttaaaatccactattttaaagttaaacttcaaggaagaaaaaacaaaaaagaataaaaataaagtgaaactgcgttgttatttgtgtgttttagaatacttattgacccatgtgtatgcagcaatgcatataatgggcccatcgctgtcattttagaatttcccttggggcagtgagtgaacaatagacaatatacgaaacaaataaatgtgtactgtatattagaaggtgtgcgctacaaagcaaaaaataaaaagaggaagaaagcacaatggaagacggtttacatatgtgtggcagaataggtcttattgataaagtgacatatgaggacctccagaaggtgactgagttgcctgttactctaggtaggctgaggacagcagaaaaatgctgatcatgttcaaaggacagcaaggtggcctgtttggcttctgtagagggatccatggggagagaagtagaagctgtgatcagggaggtaaatttgggcagaggccagatgtgtagggccttatagatgatttttcaggtctttgtcttttactctgaatgatgtagcatgctgttggggggtttcatgcaggtgagtgacatgatctgacttaagttttaacaggatccctggctgctgtgttgataatagactgaaggggaggggagggtgggtcagagagtcaggttaggagacaattgcagtcatttctaggacaggtgatccagcatgggaccctgagtgttagtagttagaaagggcaaggagtagtttctggatctctttcttccctcccctcccctcttcgttctttttctttttttttcttttcttttttttttttgagacatggtctcactctgttgcccagggtggggtacagtcgcagaatcatggcttactgcagccttgatctcccgggctcaagtgatactcacaccttagactcctgagtagctgggaccgctggcgtgtgccaccatgcccagctaatttttaatttttttttttttgtagagacagggtcctcctatgttgctcaggctggtcttaaacttctgggctcaagtgatcctcccaccacagcctcctaaagtgttgggcttataggcatgcatctctgtgcctggcctgggatttttgtgaatgtacaaccaagaatttgctgtgctgtccgggagggagttagggagaaaaattaatgctaataaatgaaaacaagctgtcctgccgagacacttgaaaggtctaaatttccccttaaaaagtagtcctgcagttgagaactgaggatacaaagagaatgaaagctgattacagcatgcttcatcctttgtccagcatcttctgaaaacggttattttatattgcagctttgtctgcattagcagttttacctgcaaggaaaggaattctaaattgctaattagagcacttgtttttcacaactaggatccagctgttttggaaatcactaagcattttctctggaatgggagttcctgaactaaagtattgcagctaagttcatcaatatggtagatgggaattgacatatgcttgcatcattcagggtttagttctagaatctaaaaggaaaaatgtatgtgctgtctcctgcttactggcaagctgtggatcttaacttcagtttcctattaatcgtattttttatgcatcttgccaaataggactcttcattgtgtttaagaaaatgatttgggtccagatgcggtggctcatacctgtaatcacagcactttgggcggctgaggcaggcgaatcacttgaggtcaggagtttgagaacagcctggccaacgtggtgaaacctcatctctactaaaaatatgaaaattacctgggcgtggtggtgggcgcctataatcccagctactcgggaggttgaggcagggagaattgcttgaacccgggaggtggaggttgcagtgagccaagatggcttctctgcactccagccttggtgacagagcgagactccatttcaaaataaataaataaataaataaataaaagattggtttcttctttaaaaaaataaaactctcagacatgtaggagtccaccacaaaactgtcaaatgatgctttcctttgccttcttgataatgtacatagactactgtcagagatttttttttcatggtattagtgatatttaaacaggtagttgaagaactgtggaaccaacaccacagagccatactctaagccaaagttttctcttttcatttccagtaaacaagttactgtgatgcctcatgactgtcttttttagagtgtgttggtattgttttaaactattttttaatcttttgataccttaaatagggcagactgtcttagtacacaaaggcctatggtttcaattagttgtacatggaactttttttgtaccagtttttatttctaccttaatcttgcaacgtttatgtcattaatcttctcaaatttagtatgtcctttgggaggctgaggtgggcagatcacctgaggtcaggagttcaagaccagcctgggcaacatggtgaaaccccatctctaaaaaaatataaaaatcagccgggcattatggctggttcctgtaatcccagctactcgggaggctgaggcaggagaatcactggaacccagaaggcagaggttgcagtgagccaagatcatgccgttgcactacagcctgggcaacaaagcaagattccatcttaaaaaaaaaatttttttttaaatatgtcctttatggaacactgtgccttttcgtgactgactgtctttaggcaacaaaagcaattgcttactcacttaatttccttttatccacctacttagctttgtgccccacctaaaaacatatgattctattggaaacgttggtacttttgttaatacatttataatgataactgttttctttgcagattatgaagagacagggtcaaagatcccagtactggtagtctgttctcaccagtgcatgtccttagctgagagatcctgtcctttgtggagcagctgaactcagctgtaagacacagacctgaagtctgtgttgaaattgtccttcagatttgcctaacatcctaactgcccaccagtaccaaccatttaaatagtgctatagcaagaagtttaacgagagtctctggagccatctctctgagtttgaatcttgctttcactacttgcttgatggtgtgatctaaataccaaatagcataacctttctggctgcaatttcttcattcagaaaatgagggtagtattgtcaggagcaaataaggtaatctgtggacgttggtccattgtcagtggcctataaatgttacctgttaataaagaattggtgtgaagggttaaaaaccgtttactaggggaatgatcttggacaggttatttaaccctctgccctcacatgcctcatctataaaatgggggtaatatggaagtttatggcctacagtgaatttgagaattatgtgagatgactctttgaaagcacttagcacaaatgtctggtaacagctagtactccatatcagcctgtcatattgttcttggctgttttcctcattctcaaaacagtttccttgacctcactcttggaggtgctgtatggggcctcagaaatatgttttatttctaatgaggttcttcactgcaaatctcccagcactagtctttttggtttagcatttcggaaacactgtcttcgtcatccatgaccattgtcagtgagctgccacatctcaccatggaagtcctaaaatgaaactgtgtttcacttagaaatagaattctacctatttttctgaagaatacttttttttttttatggtggcaactttgtttgctgtcaatataaatatatcgcttctgtaactctcacagttgcatgtgtttctcctccatcaatgatctgtttagcccctaaaattataataattcctgtggtctgtaaagattttcatcaaacattttatgtcgatcacaaatttagacacaatgaaaaacaagaaagccggccatttttacgttttcactgatttgctcttttttatatattctccttgtatacccctatttatttgatgcaattttatttgccaaatgcccccactgtcatgtgttggattacaaaggtgaagttctatgtcctacccttgaagaaccgtgttctaatattccccaagggaggtcccttgttacctactgttgggaaccctgcaatgtgctggaaaacattactacattttcaagtgcaactgacatggatgcatttcagcgagatccttgacagaatatctcttgatattctcagagttgacatggagaaatgaggattcataatagattgaaaaacccttccctgggaattctagataatgcactactgtaatgatggagagttctatctttagccctggccttttgagcatttttatcaaacagcttgacaaaggagatggatttattaaatttgtgaatgttgccaggaggcataggtcagaaattggatgacagtcaggatctccctagttcccaagaggtctgatgggtgaaatttaaatataatgcagtagagaagcaacaggtaatgcagtgtaatggaagagttgtataaacttgggtctaaatcacagcatcagcttaattgtttacttgtactaatgggtatattagcaacctacagggttctcatatgtggttaacataaaatagaatattgacttcctttttaataataaattgtctcatttttagtttcaaatgaagtatttgttttaatatggatctgatataacatcacatggaaaagactgtagggtctttttaaaaaatttttttttgagagggagtctcggtgtcttgcccaggctggcatccagtggcacgatctcggctcacagcaacctctgcctccctggttcaagcaattttccttgcctcagcctcccgagtagctgggattacaggcgcccaccatcatgcctggctaatttttgtatttttatatagatagggtttcaacctgttggccagcctgtccttcaactgctgacctcaggtgttctgccatgccttggcctcccaaagtgctgcaattacaggtgtgagccaccgcgcccagcttataggggtctttttctcccacataattccataatgcattgtttctcaaccttgtttattattgcctatctccctaggagtcttttcagacattttctctttaatcaccccctagtccctgagattttaataccacagatagattgtatatctgattatgtgctctatgtatatttgtgccttaaatgtaaaaagagtacaatatttctgccctcccccaccccccacactccaagaacaaacttttacctcaccgggagcaagaccacccaactagaggcagtgtcacccctgttgagaatgcatgctatgatgtgataaaacctcaggggtttcagagttcattgagaatgtcctgagatccaggtctcatgagttctctaattgtgtgtctaattttttaacatgtttttggttaattatagaagtattacatgtattttcaaaataagtatctccctggatcatgcatgtgttttgacttccagaagtcatcatcattaatggtttaggaagttgccttgtaatttttgtgtatataccgttactggttttgatttgtatttattttttctttacatgatgtgatatatttctgtaataatagttctgcaactagctttttttttcacagaatggcattagatacttctacctccatttgaaatttatatggttttttaaaaagtttaacttttaaattggtaagatatttatatgattcagtgttcaaagagtataaaataataagtagtaaaaaattgctcctatttcctctccctgtgttaatgttatagtgtcttaaatatgtttacagagatactgtatgcatgtaaaaaggaatctgtgtggccacttattttctcatattagaaacacaaatggtgtaacataatgcatgttgggtttttcaattaaaaatgtaatttagaggtcttttaatttgagtttaaagaggtttactttttcccccaatgaattccagactatttcaggcttctgagtagctgggattgcaggcacctgccaccacactcaactaatttttgtatttttagtagagacggggtttcgccttgctggccaggctgttctcaaactcctgacctcaagtgatctgcccgcctcagcctcccaaagtgctgggattacaagtgtaagccaccatgcctgactgacatttagagctgattgatttctagcatctctttgcgtactagagaacttttacttttgcagtatggattgcaaatgtgttttgctggtcatttgtcttttgatgttttttaccgtagttcctccaaagcagaacattaagtattctttattgtatttgattttatcagtcttttttggcttctagttaatatgtggaaatgctttccctactctaattcttcccacaactgcttcttatacttttatatatttattttaaacatttaaatcttggattcatttgaagtttgtcctagagtaaggtcgtctagttttggaccattgcatagtattatgtaataaaataagtttgtaataaaataagtggtggatatttgcattattgccaattctttcgtattataaacattgctgaaatttaatatgctttcttgtaaacatatgtattaagttgctggtacataaggtatgcagatgtacatattacctatgtgctgtatttctgccagggaagcaatattttgtgatttagagccaaggtcaacaaacagtttctgtaagggcagatgataaatattttagactttgctgtctcttttaaaactactcaaatctgatctttagacaatatatgaatgaacggatatgaccaagttccaataaaactgtttataaaaacaggttgtgggctggatttgattcacaggccatagtttgcaaatgcccgttttggagcatggtttagtcccgtagatctggaattgactgtttgatcttacacatactacacgagggcaagttttctagcttctgagcctcagtttcattatctgtaaaatggggaaggtagggcatatttgacacgagttgttgaaaggatcgaagaagataaaatgtagaaagttttcattacaatggatatagtgaatattctccaaatggatgatggattgttgatgttagtcatttgatagcagaagtaggacttggatgtttaaaaactcagctatcaagataattcagattttgatgcaatatggttgattattgatttttccttttggttcagagtccaatagtctttgcacagcaccgttactgataatatctttctttgcctgctcatcacagatgttttgaactcatttaaaattttatgacacttttgaaatattatttgttttgataactgaatttttggtgaatgccttgtttgccttaccctagtcctatccctgttgaacagatatgaaaatagacaagtctctgacatcgtgaggctcattttctcatgggccttgcactaggaagagaaattaacaaagctaacaaaatagagagtggctaaggttgctattttagatagttaggtcagaaggcctctctgattaggtgacttttatgactagtatttctgctaaaatccctctaatttttttcctaggtctcatttactggaagttacttacactatgaatttattgaaatagaagtgcaagttaaaatcaagtattcacagtgtgacagtgggacacagaattcatcatgttgttttggctttaccgcataaatatggtgctttatgtctagacatttccccagatagcatttaatagttaatatattttggagcaaacgttcctccttttatggttgtcacaggaagtgagttaatcatcctgtctgcaccctgtgaagtgtttcctagtcccacatcccatccacaccaggcccctgtgctgttgagtgagtgccttgtaaaactgcttttaatttctttttttttttcctctcagcctttatgtcagtgggtaggtatacagaccctcagccctcctaaacaccaaactcccaaattctgtctctgggaatttttcccttttcctacttgtgattgaaatttctcatgagcttgagcatctttttaaatattaaacaaaaccttgtggagcatgatactgagtaatggtgtgaaaaagcccttccatacaaagaaaggaaatcctggccgtgtttaaaccagaccttaactgccagttttgttttgctctctgggttgcatctctgacttttcagaatagtgcgtgctcacctcagcaagtctttcccacatgataacttgagcggtggcatgtctctgaggcagaaaacttcagcaagaggcagctgttcccgttaagtgcttcatggatttttatcccatgactgctgtgttaacagtaaaaatttacagcaatggacttcagagcttgtttcttctttttttgtctaaatgagatctttaaaaccttagccaagttcgtccttctcttatagggaaagaagataggaagaaagagggagaaggaggagggaatttagggttgttatttttatatattccatccagaatgcattcctgatttttgtctttataatttgacattttcgtcttagtgaaaacatcgaataatttaaatgttggtcttcttaaaccaccattttgattatatcctatatttattagttacaaatagcacaaagcctactcagatgggttaaaatacaaaggcagttaaaactgaaaagtctagagataaaatttaaattcagacatggtttgatcagatcttcctctctattttcctccctttctcttgttactgtctttttacttttcagctttggccttcagctgcttccctcctgattgcaggtcattctgctcccttccttcttcattcacattcaagggaggagggcctcttctcccctacaggctctgaacaaaattttgggccttgccttgtgaatagtaccaacctaaaccagtccctctgtattagtccgttctcatgctgctgtgaagaaatacttgagactgggtaatttataaagaaaagaggttcaattgactcatagttccacatggctggggaggcctcggggaacttacagtcatggcagaaggcacctcttcactgggtggcaggacagagattgagtgcccagcacagggggagaccccttataaaaccgtcagatctcgtgagaactcagtcagtatcactgcaacaggatgggggaaaccgcccatatgactcactttcctccacctagtcgcttccatgacacatggagattatgggaactacaatttaagatgacatttggatggggacatagccaaaccatatcaccctctgaactgagaaatcttccaggcgctaactggcgtaggcctgggttaacaccctttgctgattcaatctcttgtcaaggaggatgagattccactaattgccatatattagtcaagtgctgtttctgaagctgggtcagggtcatgccatttagatattagtatttggatgtgtgttcctagaggaaagtatggataatcatgtttagtgagtacttggtatgtgccaattactgttggacatgctgttggtgtaaatcatttattaaacccttatcacatccttgtggttacttttagtaaggtacttggtggggtttggaggtcagctggactatcaacaaatattttgtgtctatttgattcttccaggtattacaggacgtgctccgattgaatttagaactcttaggagctttagaggtgatctaatgtaaccctgtaatttacatgtaacaaaattgaattcttataaaacatcaccactgccatattcatgtccactctccagagatgaaactggaatggaaagagcaaatacgtgacatgactgtccccctagaaaggtattgctcattaatcttgtctttatgaataactagtcatacaatttgtgagttatttggagccaacatgcaaggtaaatcttacttgttagccttgaactagaactcaagttgccagtcaccttgcccagtgctctttgtactctgttgtatgacctttttaatccttggatgattgtttctattatgtctcgatggaaagtcaggattctaaaagaacatattagtcaaaatgttgactatttgggggtgtacctaactttaaggttgaaaacttcaggtctggaacgaactcatctccattttataaacacttaagatgtttggcattggctagtaagaattgtgataactttgttagtatctcagatacttgttgaagccagtttcctgttgtatctatgagaagcaggaataaagctggtacaactttaagtcagcctagttaggtttggggtgaataaatgatcccaattattggtagaaatttttaatgaatgtttggatgtggggtggattcaacttgaaagatataacttttaaatcccagatacacctaaacatgcataggtcaaagacttttaagtctttaaaggaccttcagaatcttgcagtgtgtggatggcatgcatattcatggtttgcactctaataatgtcatattatacacccatgcgggcatcactaatcagtcaactccttttgagcctttactcagcctagaggtctgtggctcagaactaaaaggtagccattattgccatctttactctttttaataccctccttttccagaacagtaaaacaggctccagagaagctttttaccatcaggattagagtctgggacctccagtttaggcattggtactgaatgaaattttacctgaaatagttttaacatccagtcctaaaatagacaccctgggaaattagacagataatggtattaaaaaatgaacaaagtagttagtttctatttctggtgttattgtctgatattacttctggtattatggttagttgttgatagttttctttaagcacaccattgatatgaaatggagtactgcagtttttacaccttaaatttaaaaccaaaaaatgtgtatttcattatttgcaaagtaactttatattttcttaactggtttaaaatttagaatatttctatcaacaaagttgagcagctttataactgaatatgaataaagtaaaaatagtggcaagcagtaatatgcatgccttttaagactttttccatttttcgtgtacacacaaacaataaatgcacaagaagtaattaagctattagtactggagaatgcaaaagaattgtaatcagaatcccataaagattttaattaaaacatggaataatttaaacctgtgtattcgatttcggataaaaagcattaattataataggtaaaaatgatacacatatttttggattgttgctattggttaaaagtagacaacaaaatgcagagtaataagcctggattcaggtaatatttgtaatataagtttattgagagaggcattaataagcatatttgactagaaacagcacataacatgtatattagttttgtttttaattagatttagacagaattcattatttttaatggcttttcattagtgaataggaaccattatttggatctattgtggtaaaataaattcaaggtacatgcttattttcagcaaagaacctcttaggtatttaaagaaaccactgtttggaacatgaatcatatataggtatgtgaaattccttgcttttagacaaaagtatgatttctatgctcatacaacttttatcttaggtcagttattaacagagaactatactgaagtgagacagtttgcttaaattgtagaaaattcttgttgttgaccagttttatttgtccttatttggacttttcaagtagtattgctggggctgatggtagggcaacattaaggtgtttctctcagatttttatatgatatttgtttgaatagaattaactagcattgatttaaaatttatatgtgtcgaccaagttctttgggctaactctgccttaaagaaactgagtatgaagtgaagtctcagattcaagcccagatttacagtatttgccattattttcatgtgaggaattctatctgccttaaacagaccagttggaattaatctccaattgtgtgatttattctccctactgtggaaatatgtcttcctgatgctagtctactgaattgtaacatctcaaaatgagaaaaatacagtgacttgtgaatggcacactaaggaggtagaagtggattattttaatgcagaaatgagctataggttaagctaatgatgtttttcttaatgacagctttaaaaactgaatttctccaactttatataaggtttttatataagcttaaataatatcacccatgaacttgattattttctttaccgtagtctcttgtttccttcgtcttttgtgtttgcagactccatttatccaaaaagaatatgacagtcatcccagtattacccataaatcagtgcccatctccctcatctatcatgccatagacacggcctaagtgcataccagtaaatccagtaaaacctggttagtaaaatttaacttatttaacacaacttatattttacttggcttctatgcagtttgctccataatttcttcatttcattgtcagagtagccacaaaagaatgaccttttgacaaggacctactaggaacccaacatgggtgtgtttactattaactgagcaccaaactttactcagagctcatgagtttttccattaatttttgtttttgattccaccattcaatctagagcaccacattctatttattgtctgtgtctccttaatcttctctgatctctgacagtgttttagtctttctcatgaccttgacacttttgaggagtgtttgtcaattatatagaatgtttgtcaattatatagaatgttccccaatttgggtttgtctgatgtattccccatgattataccagggttgtgaatttttggaaagaataccacggaggtgatttgcccttcttaccacttcctgtcagatgtccaagatagccatgtggtctcactggggatgttaaccttcatcatttgactaaggtgacttttgctaggcctctccactgggaacttactcactaaatctagccaaagatgggattaagttcttcttgccagaggggcgaactctacttttgactgttggcttctgcccaaatgggaaatgcctgagtaagatgaccacaggctagtaaacttctctgcactgcaggaagtgacttcactcaagtgtcaccgccaccataagttccctcctggggaggtggggcccctcctctccctttgcatgccatgaaatgcttgcacccacctgccttagccgttgggtgggctacatgtctgtttcatccattgcctagtcagtttcttgacagtctgctatacatttacaagccagtaacagaggcagtaattattgtgggcagcacttactgaacttttagtgtttgataatgctctaagcacatggattatctaatataatccttacagctaccctttggtatctgggtacctcattgtacagaggaggggctgtgagccacaggcagcttaaattgtccaagggaactggggcagccctgctccttatgtcccatttctcagccctgtctaggactgagcaagtgtcgattctgtatttaaattgataacagtgatggattgatcattaagactaaatttcttctttgattgaccttctttgattacagaggtctgttaaagcatagaaaaaataagagcagtttaaaaatgatgatgcttcgcagaaggcatcaaaagcaagagttctactgcaccctttctttaaaaagccatagtcacctttgctgggcttgttaaatttgcacatggattctttcatggacatctcatatttgcagcttattttaccttgtcacagttgaaacgaatttaatatattagtgaagaacgaaaaggagtatttactcctgaagttgacatcctggctctggagaccaagggagtgaggaatacttagcaagaagtcagtagatagatgggtaaactcaaactaaaataaatatgacaatgatcatattgaacaatcatatttaatacgacaatcatcatatttaatatgattgaatcatcatattaaagagtggaactctgccactctttaatgtcttctttcagttctctcttctttcaattcattcatttgtacctaaaaatatgttttaagggcttactgtatgtgagcccctgtgataggcattggaatgaagttgtacaagatacagaaggaaccagttctcagagtttaccaccagtggggaagacagacatttagatataaatggtaaattgtataatagtaataatggggtccaaaggaaaccaagaacccctgtgtatctctcacgaagggacgtttaccctgagatcaaacttttagccaggggtttcagatgtgtttattgaattcattaaaaaggatatatttgtcatcacatgttgaatgagaaacactattacattcccttagtacttagaggttggcagtatgtctcaatcaaaatctcatttctttaagactttcatcaggtgaacaggaaattacttttggcagcccaaattgccctgtgttttctaccccgcccttacctcttcccttttgagaacacggacttgtgtactagattgacgtgttggagttggtgagccactcagaaggatcttgctgccaaaatacagatgtcttgttacttctaagaaagagtcagtaagaggaaactaaagtgcaagtgacttcttattcttattttagatgggtaatatcatgtctgagagaggaaggcttcttgttaagtgttcatctcttcccaactaggtttaagttaaccatagtctttatttagtatcttttttttttcttttacttaaaagtatttattcaaatttgtgaaaaacaaagcattcaatactatgagtcttgtggaactgcaaatgattaatggtataattctcagtcttttataaagtgtcttaacactgaagagatttatacagtgtggaatggcaatggtgcttcgatgtgagaatagataatcaatatctgcaagcttggaaaaagtgttctatttcctctgctaatgacataggggtttttgcaaggcaagggtgtctgaagcatgaagtactccaaagaagaattaatttgaaatctgaagtggaagatcagtttcaattaaaattgcacttgaatgtatattgggtggaagtgtgaaagcaagcatgtagttggcttaaagcttcagattgttaccagtgaataaatgaatcccactggtatgaacccagattatatttttatagagtgataaattgtattttacccatgtctggaaggttatgagaactaatatgaatggcaagtacttttctgacatcgcagagtattttttaaattgttagtagtaggaggagaattatcaggtatctgtttttacaaatgatggcttgcatctattatttgagtcatatgtatttggatttattttactgtgtcccatatcatttttctctgttgagtgtaattttattgtactgtaagtttctagaaggcatgcatacatacacatatgatattatgatattaaaacatttagattccataatttggatttacaaactcaattgtggctaagtaaaattcctattttggtcagccatctaataaatcaacaatcactttatttggtttttcaatggattcttttggcatctggaagaaaatttaagctgtagacaggataattagagccattccttacgtctcgttcgtctccttttttttcttttttctccaaatatgtagatgcaagatgaaaataaagtttggccaaaataaaatttggctaaatatatggcaaatgcatactatccctttgtgaatcatcacagtcatagggaatttgacaaagaggtaaaaaaatacatgagtgaaaagcctatgacagttgtaatcgtgcagtgaagaaaatggtgatgtgaactttttccggatagtagcgcgacacttataaatgacttaaaagtgccccaaggttgctagacctttgccagtcagtgaacatgttcatttggatagtctgtttttaatcttactctttgggatgaggattagggagaatgactgaagcattagagtgaggctgcggtattttccagatagcaaaaatatgcatcatttttaaggagctatatccattgctcttgcagccatgaaacctcccttaccataatggaaaatactttctgtgattgtcccatttttcttgtaccattgtttatatctactgtgagctgttaccagtttggggggaatggggaaagccatggcaaatgattgggtggcagccactcatgtggactcttatttagtggtaggcaggtttatctactactaaactaacaaggctagtagttagacttacctactaataaactaaacaagatttctttgtgtcttccattgtatgaggctaggtatacaggaggcacaaaaatccccacccatctaccagtatttctgtagatgaatgtatatacacacattaagctttctcattgggaagcctgtgttttacttgctaaaaattgtgaagtttttttcttatctaattctcaataaaggattcagtcttaatctttccagtaaaagttgtttcagcaggctactcccgctttgttgtgtcaacaaggttaaaagtaggatgcagaaaagtctaagagcctgtagtcaacgtaatagaaactgctcccataatatttcatttccaaataggacagggaggcaaatgcagtgtgttttctgtatttatacctgattggtacctattagaattatgctttatggttgtgctttcttcatttatttctgtggcatatgtccccccaaattctttatttatatgagtacagagtccagtctgaaggtaactttatacctgcattttctacgagagagaaggattgaaaaggagagatgagtgtcttaacactcaagtgtacaaatgagggccaaactgaaaaatctttcacaattagccaaaggaaaaacctgcctttattgcctccatgatttgtaatgcctctcatctagttttctgttgcctttaattttttttccctttttcatgtttacagtcttttatgggctaagaagaaagttgtatttaggatattgcccacaatagcaaaacatgctaactcgatcaaggtgctttttttgtgaataaatgctctgcttattttaggaaacatttaaaaattgtcagaaatatggacaaccctaatagcccttctacacaactctcttaacctgattaaagataaagttagcaaatgtttgattgtaaatcaagaagcaaaactaacttaagtaacatcttttctgaaatcttcttgtcacatcaggccaatggctttgattcatagttttcagtacattcacctctttggattggggacatgttgagagatgcagtgctcagcttcctaagatttattcatttcatccctgacccttgaaccatgaggattgaagtgttgtcttctttcaacaggtgcctatggtcctgagcactgggtcacgtctagtgtcagctgtgggggccgtcaccagtctcctattgacattttagaccagtatgcgcgtgttggggaagaataccaggaactgcaactcgatggcttcgacaatgagtcttctaacaaaacctggatgaaaaacacagggaaaacaggtagacaatggcttctttatttgtccacagagcaacaggaactatttttggatgtctctggtgttttccttaaccatgacttgctccttaaatagtgcacattgctgtggggagcctaaatcagtccttagtttcagaacaagttatgtaactcagtaaatcactctgtggctaatcaccctgtgtcttcatttttttaaaaatataaactatagataataaagtattatacatctagacctagggtagtagtgattaaatgagttagtagatgtaaggtatgtagaaggactttcagaaagctacccaatctagtagccactagccacatgtgactatttccatttaagttttaattaaaaattaaataatattaaaatttggtccctcagttgtattaggtacatttcacgtgcttatctgccacatacggctagtgactaccctattgggcagcccagacagaggacattctctcattgcagaaagttctatcaggtaacattgtgccaaatatgcaaatggaaacagaattcttatctttcttgagattttgctttattaatattttttattacttccgagtacagatgaactgtctcatccctttgtgtatcagaccagcaattcaattcttccacttgtcattttgggatttgtgaatatgcagcatcgtctttttaccattgctaatgcgaagagctgcctccctctcaattactgttgtgcaaatatcagtttatagattgtccttgtaagtaccagagaatgccttgctgtgctccactgtacgatctgaaaataagctctgggatgttatattacatctctgcttagtgctacctggggttctgttgatgcctaaagatatttttcactcttattacttaactacttatgactttggcccattaaagcaagtttttttttctctttctcttcttaaagtgaaccctttgtaaccaaggatgtcactgtgaaccactgttagtaatccctttcaggagccttggctgtcagagccctcatgctgggctaaaatgacttagctcctagccctttggtgctattcatgttgtaggtcacaaagttgcctttttttttttttttttaaataacctaactggctaaatgggcagctttagggatccattttctttctttctccaaaccatcatttgagattattcatagctgattgctttgagtttgcctggcatgttcatagaattgcttcccactcacttagcgcagtgattcctggctttgggccttttttataatgcccccagaaacaattctgcttcctgtgttatagcaggtgaccctctcctgtaccttgattcatctatatgagtagctgcgtagaaaaaactggtgatccaataatgttatttgtacgtaattttttaaatttttgagacggagtctcactctgttgcccgggctggagtgcagtggcatgatcatggttcactgcaacctccacctcctaggttcaagcgattctcctgcctcagcctcccaagtagctgggattacaggcatgtgccacaacccccagctagtttttgtgtttttagtagagacggaattttgccatgttggcctgactggtctcgaactcctgacctcaggtgatctcctcgcctcgacctcccaaagtgctgggattacaggcatgagccactgcacctggcctgtacgtaccttttcatcctcacctctctaccaccccagcacagattgtgtgcttattgttacaattcagaatttacctatcagttgccctactttatgttttaaatatggtgttcttaggataaccgcaatgagattatttctcttcataccatctaaatgtagtgggcgagagctttgccacactgggtgcaatcagattggaactgagtaccacctcagcaccacattctggaaggctgtcaaagacaatcactgggctctctgatacggttttctacttgacttgcaacgcttgacagccttcggcaaagataacacgtttcattgacagctttcagcttcgtatcaccaatgacaggttttagacgtatgtagggttcactcgatgcaagctgattcatgaccttggtcttccagaagctgattatcaatctgtgtcactctcctggcttcctagagtgatccacaacctgttgcatatctctgagtgcatgcacttgattttagagcaaagctatccaaatacgaagccatcagtctcagaaatttcagaagcacagtgttctgagaagcagaaatagatctttgttactctcatacaacttattactgtaaaattcactacataatattagataggccaatatattgtaaatactctaagatgattctgtaggaagggtttttaaaaagtgacaaccagttatatgcaatttgaaacaaagaacatgcatttttgcatttttttttttaatctcttgaaagagttttaacttatggtggtttagaaacttgggtgcagaaatcaacttgtattgttttgttttaacactaatagaaacttccttcatttggtaggtctttttttctgagacggtctcactctgttgcccgggctggagttcagttggcatgatctcagctcattgcaacctctgcctcccgggttcaagcagtttccgtgcctcatcggcctgagtaactgggattacagacagccacctccatgcccggctaattttttttttgagacggagtctcgctcttgtcacccaggccgcagtgcattggtgcaatctcggctcactgcaacctccgcctcccgggttgaagcaattctcccacctcagcaacccgagtagctgggaatacaggagtgcgcgccaccacccctggctaatttctgtatttttagtagagacaggatttcaccatgctggccagactgctctggaactcctgacttcaagtgatctgcccgtctcagcctcccaaagtgctgggattacaggcgtgagccaccgtgcccggccatgcccggctaatttttgtatttttagtagagacaaggttttgccacgttggccaggctggtcttgagctcctggcttcaagtgatctgcctgcctcagcctcccaaaatgctaggattacaggcatgagccaccatgcttggctattctgtggatcttaacacgccacattagttcataaattttttagaattttggagaaatgagtatttatttgctctgttttgtctggaacatataaattcaactgaacagtgcatattagtgcaggctaaattagggtggggttgataatttccacattgaataatattgataggtaacctatttcttttttttttttaagaaaccacctgtcactgtactatagttttttttgttgttgtttgtttggtttatttatttatttttttgagatggagttttgatcttgttgcccaggctggagtgcaatggtgtgatctcagctcaccgcaacctccgcctcccgggtttaagcaattctcctgcctcagcctcctgagtagctgggattacaggcatgcgccaccacacccggctaattttttatatttttagtagagacggggttgctccatgttggtcaggctggtctcgaactcccaacctcaggtgatccgcccacttctgcctcccaaagtgctgggattacacgcatgagcctccgtgcccggcccactgtactagttttgaaagattgtacaattaagagaaatgggttaaagggctcatggtatctgtgcattatttcttacaactgcatgtgaatctgctattctgagaaaaattaaaagtttaatttaaaaaaattcatgtatcataagccacatggtctgtctttgtgccatccattttatatctatcttgcatacctaaaagtattttagagtattttgtggaactttatattccaggaaataaattcaagagggagtatttatttttttctgatggaaatttacaggtcacttatctgtaaaatagactctgtcttttgtatattaaaatatgaatatagaaagttaatatttaaagcggcctattacatacagacagtaactctcccataaaacagcttaaatgttcagatctgtcttaatcccctgagagtgctatatatcctatccagcataatcaatagagcaacttggttgtacctagcccacttctcgaaagttgtctaaaatatcttcacaagacagatagcatctctctatttcttcctgaggagccgtaactatctattgtgccagttcccatttgatttcatctaaagttatttccctttctttcatttttgtagaatgaaaaggtaatgcattcatcaagaacatttcaagacaatcttgctgttcctagcattagcttccagcaaaatgatcagaatttaatacttagacggtgcttctgatgtatgttaataagacgtggccttctatgaattttaactattgggagggtttttattttatttttattttatttttttaaactactttttcttatatcccacactgaggacaaatagtaaatgtgtttaccacaaggcatgctactttcatcttctcacattgtattggtttattatattttttctttgcctacattcttccctatttgtctgcatatgccatagtgcctgtgatacaggtggattcaaaatatggttattcaattcacacaagaatcaacgggagggaaactatgtatagatggggaagtcaagagtcattttctagtatgttactgagcccataaaagtaaggcaagtagtaggacactgttgcattgagtttactttacctggctcttagaagtttttagtagagtagcaacttaagagcacacagaggcaagctaaataatgaacaaactaattgcaagctggtaaaaagagaaaaataaaatcttaacaaccttggtcacttccacatgctatttccctgactgagcttgtgacccaagctaagtgttggaggaggatgtagctctgctgctctgctcagacacaggccaggggtaactacccctccccaaggtcaagcaagtatctggagttgaaagatactctttgccctgttgactgctgcctctctgcagccctgaagagccgcttgtctcttccaaggtcagtggagacaaggatgtgtgagccttactgagagtcagcaccaggctaccactttagatgggtaccttacaggttttttttttcttttttcttttttcttttctttctttcttttttttttttttttttttttgagacagagtcttgctatgttgcccaggctggaatgcaatgtcaccatcttggttcactgcaacctccgtctcctaggttcaagtgattcttatgtcccagcctcccaagtagctggaattacaggtgcatgccaccaagccaagttcatttttgtatttttagtagaaacagggtttctccatgttggccaggctggtctcaaactcccggcctcaagcaatctgccccacctcggccacccaaagtgctgggattacaggcatgagccactgcgcctggctcattacaaggttttcaatagcaatcttcatgatgtctgatttccctccaaaactgatggacttttgtgcctagccctcatgcaagatgtgatccaacagtggcatggttgctcaagtgtaacacggatgcctttagtaatcaagagattggttaggaagtttctaggaaaagtgtgtttgtgtgtgtgtgaggggggtgtgggtgtgtgggtatgggggtgtgtaggtattgtgtatgtgtgtgtcttcatatgtttctgatagtctaggctttccgcctgcctgcccgcccgccttccttccttccttccttccttccttccttccttccttccttccttccttccttccttccttccctccctctctccctccctccttctttttctttttctttttttgatggagtctcactctgtctccaagctggagtgcagtggtgcaatctctgctcactgcaacctctgactattctttgtattctgttggactcgatatgtctttctctacggatctctccacgagcctttacattttttgttgtttcattctctcccgcatttcctcctgtgtcttcttgcatttgcctccgctggggcatgtctctgtctctctgcctgattctgcctgttttcactccttgctcctagcattggcccccttctctcccttcttcctgtcttctttccttagagctggccatagaagagaactgaagtttaaaaaatgtttttatttgttgtatctgtggagtagattttgatattgacaataataacctaaatgtgttcttattgtaataaaacctctcttatccctgataatattggatggggagggcctggaaaagtgaaatacatgaatgattccccaaatgtatttctgggagggtttcaaactcacctggtaccaatcattacttttatttttaattataacgcttccagtagcctcctcaatgtaatgatccttaataggtgtaaatatgggatgatgatggtagaccattgtggagtcatcattccttgatcaacagttgcttttttactctgagttttgtttatggcactgatgaataggtcatttcacctacaaagagactgccaagcttctgattaagagcagaacatcagccaagtagacagacatttggaaacatctgggcccttggcattgtttatattgggcgtgtctaatataaacagtgtctttgtagtaccctggggcatctctggttagcttaaggttgcccaaagaaagaaaatgtaagtttaatttttaaaatccattctttatttggggaatgctaagtgtgcttttgctctactttatacattttcctgtttcaaaggcccacattctttggttctttcattctaatactatccagctttgcctgaaccctggaattgagcttggagctatttcactgggtcactctttggctagatactctgcaagctgtgtttcctgtctgctaagctccattttctttgttatccccacagcctcagtccccaagttcagtagtaggaactagtttctgtgtagacagaagcctcattaaccaattaccctgaatgttacaggccattttttgaagaaccttttctgttttagggtacagcgttctctgctagactcctccatctttcgtgtcttatatggttaaaagtgttaactaatccaccttgttcatctcactcagtttagcagtgagttaactgagacccaggataatcctgcagtttgtcatctcttggatatctgaggttgctcttactcagcacgtccagtgactctttactggattactgctatcagctcctcacttatttctactgacagcattgctttcctcccaggccttctccacagagtagccagagtaatctacttagttccctaatctgatcttgcctgtctgtctctccctctttgttgttctctctctcaagcatatcaaggacttcccatttctcttgggacaaacacagactgctcactgtccgtgcctcatgctctgtcctcgtgtcccatcctgctctctgggtacctgtcaccttggctttctcttactcgttaccactaccacagggccattgattctttcttgatgttctcccatcttgttggcacttccccggggtagctcctttaactctcagctcagaccatgacaccctccccttctctcatctggggttcgatgctcaggtgctaccccttgtcccactagcaggtttgcttctgttgtctgtttagttcttgggacctgtccttcccatcggctgtaagttccataagggcaagagttgtgtctgatttacccacctttttctgccagtcattactcagtaaatatttgttgagtgtttgaaaaacatgaatgtcaatgtctacagggaaattagtggaaggctggaactagagccagtgcattctgactttcagacaacagcgtttcccttttaccaggagtcccagggcaaccctctgatgtcacaaatattgtggaaggtggtctggggatcccatcattagggtccaataatggtaggcttttttttctaccttatactcttggcaacggtgcatcagggtaggaggatatgatagtaagctgctagttttcctgtcatccatttttctttactttttagcacatgctgctgtttactcagattttggtgtgaacatttgctttagcctgtgttatacacacatgttgaatttaatttataaacagttgggggatgtcctgcaaagaatgctatgaatgccaggtacttggtcaacccttccagttcaggagaaaactaattccttatttaagatgtgacctgacccacgctttgccctggccctttgcatagcctggagcgtctttacatcatggggagccccagacatagggagaatctggtgaaatctgtggatccttccctaggataataaccttcctaaaggttgcataacaccagtgctattctatgatgtgtatgaattgctgctgtgagcattcgtcgtatatcagcccttgtgaaccccttaacaaacctgtgaagtagctgctatcttattccaattttacagaataggaacgaaggcaccaagaagtgcattaactttctcgtaagtggacagtggcagaactaggattcaagtttggacttactggctacagagtccagctcctaagcttcacgtgtgccccatgctcagaaatttacttcttgtatcaagaaggtatagacctccagagcccataggtagccacggctatggactgttggcctctaggttaagaaaccctgaatttgaagcttccagcttcttctactgtctccatcattctgctttgatttcatcacaatctacattaatcacagcaaggatagttctagaaacttcattcaccacatagacctttcctgtctttgctcttagcccatctgtcctagttagttcaggctgctgtaacaaaataacataaactggtggcctaaacaataaacatttctcagagttctggaggctggaggtccaagattaaggcaccagcagattcagtatctggtgagggcctgctttctgattcatagatgataccttctcacattccatggtggaagggaaggcagctggctggaggcctctttttttctttttttttggatgatatctcattctgtcacctaggctggagtgcagtggcattatctcgatcaccgcagcctccgcctcctgggttcaagtgattttcctgcctcagcctgccaagtagctgggattacaggtgcccgccaccacacccggctagccttttgtacttttagtagagacgtgatttcaccatgttggccaggctggtctcaaactcctaacctcaggtgatccgcccccctcagcctcccaaagcgctggggttataagcacaagccaccgtgcctggcctggggatctcgttttgaagtgcactaatcccattcacgagggttccaccctcatggcctaatcacctcccaaaggccctgacgcatcataccattacatgggggattggggtttcaatttgtgagtttccagggacaaaaacattcagtctgtaacaccattcattgttctcctgtctttagctgttagcttggcaccttccagtttgtgccttatccagattcaacttttcctgctgttgttttaatttttagattaaattttatttgtatttattatttttgtagtaccgttttcttctaatttatttatttcattttgattaaatgaattgattttaaaagaaaactctttatcaacaccattattggaaaaaccagttctgtttgactggtagagacttactgctagaaatatgtccataatctacaaaaataaatcaatcttgctcatgttattaaattttagggttatgcttattcttgagtaaaagtgggaaatgaatgagtatcagggaactatgtgggttatattagcacccaactatgattttcttttctttgatataatcaaaaagatagaaataattcagaaaaggcagtatctttttttattctgttttagtgaactaaaagcatctactcaatacttaagatctcccccccaggcccgggctgggcacagtgactcacacctgtgtaatctcgacactttgggaggccaaggtgggtgaatctcttgaggtcaggagttcgagaccagcctggctaacatggtgaaaccctgtctctactaaaaatacaaaaattatttgagcatggctactcaggacactgaggcaggagaatcacttgaacccaggaagctgaggttgcagtgggcggtgatcacatcattgcgctccagcctgggcaacagagcgagactctgtctccaaaaaaaaaaaaaaaaaaagtccttaccaatttgatagactccaaatggtatcttattgctgtttctgcctgtatattcttacccagggcagacttcggtgccagattacagagaacttagaatgtagaaagaacggtgcagacctaggcaacagaagggaggaagacatgtgggaaaagacatccagagagagaagcatccagagaaaaaggagaccagagtcacatcctttttggcatgcaaatgtttacatattgctttaggttttgaacattttcttgagaagccttctcacttgcctgctcttcagaaccgacagaggtagatgccatctcaaaaaaagtaaaataaaagatctcctcccaaatagtatttgagccacccccgctcttcctattgtccctgcctaatgacacttgttattgtgtgagaaagtgttgctttaaagtataactttctctgaaaacagagagttacacctgtgtggccagtcttccgtgctgtccaggagctccacccttgattctagaaatgagtttggaaataaccaccactgaatatgtgtttgctggcttcctggccctggatcatctgctttcccagtgtgatttttctccaggtgtcaaaatagcccagccaggtaggcactgcagtaattatcaccatttgaacagtgatagaaactgaggcacagagaagttgggtaaccttcctgaggttaccactgttaagtggcagaatggaattccaacatgtcttgagctcatatgcatgacatcttgtgctctgcagtgactgccttcggtatattctgtttcaaacagttcaatgttatcactggtcatcagaaaatgtgctagctggggaagttctctcattccagttttgtgtgtaaacaaaaatatgagacatttttggaaggggtgggtggacatgtaacatgctgtgtgctctggtgagaaacactgtaaaatgaaaaatgagattaatgtttcagattgtacagttccctaattatgcttttaattattcatataaaacaagtaaaatgacccctgacagagatataaatgatttaggtaaaatcaaatatttataagatgctgctgattccctgggtgtattgtaacagatgcaatcaaaacgttttgccttcgtcctgtggatgcaaaatgttatgtatggaacttataactggctgagaagaatcaacagtgtttgaaacactactgagctaatgcctagatgttttgacatcagaactaaaggtatgtggttggtataatataatattttagaagatattttattatatctgtatatatagatatattttatataagattttagatattatcttctaagatattatattttaagggtcacacaatgataagtttcccatttttacatttttaaatgatttgaaaaggaaaagtcggtaatatttcatgacacgttgaaaattttgtcaaatttaaatatcagtgtggttaaataaaggtttattggatcatagcctcacccattcatttaagtattatctgtggctgcttctgtgctataaagacaagattgagtagttacagtagagaccaattggcctgcaaagcctaaaatatttaccaactggccctttacaggaaaagtttacgacccctgttctaaaacatgcccaacacagagtgaaggtggcacagtgctgtagcatgtttaattggcacaagaaacacttacttttacttcattttatcctttaatttgctgttctactaattgagcattccttgtatattttttcagaagttggagaaaaactgccttttgaatgcaataaaaagggatttatatgagaaggttccttcacttgcttttaatgcttcctttatatagagaagtactgaaactaattgcagtattctagaaatgggtcattagcctagtccctatcttttatggagacctaattttcatgcaggatttctcgctaaagctctaactaggatctctttaggaagaggagacaatgaggataagtactttcccatggcttacacaagcttggcttttgatcacaaaccattcggtatattgtttggcaccttacatgtgtttagcagccaataagtatttattgaatgaatgaatgaatgaatccacttctagagaaacaaaaaaagggaatatatctcttgaatagaatttgttttttatgcatttagacattatattccttttggaaaaatattttttgtcagtgtaaatccaagttattctcaatttctccttcctgtatttcaagaaagagcagtatatttttgaaatttagggttggaatttagttgaggttccctatgttgcggatgctttcaggtattctttggatgggttaagggaaaatatttttttgcttgaaagtaaaagaaacagtcaagaaaacgagttagctgccagtatttgagtgacttcaagagtagatttttgcattacactttcctgggtactgttattaaatacagactcccaactgtcttcccacttactgttgccttgatattggaagcacccacaaatttttatttcctgatatcttgcctacattttctgaccaaagaaacatgcctattgcatctggctgatcatatatatttcctctcttgttccagaccttgaatcttggggtagccccatgaatcagtgcttaaaaagaaaaatcttgctctctagatgattttgaccatcaagcagttttaggagacactgattcagagcgactttttctgtcattgtttccatttttttttttaaatctgttaaatggataagtaattctgagatcattctctggaaagtatcatgatttagggccaactggtgctctgagagcattctgcagctagaatgaactaatttattcaggcgggtgtgttcaacatattttttcataggtacatgaggacataattcatatcatggtaatggtgaactttattagaagtaacagaaaaactccatttggttttgaaactcactttgttttcctctcttctcatttgtttcacacagtcgccatccttctgaaagacgactattttgtcagtggagctggtctacctggcagattcaaagctgagaaggtggaatttcactggggccacagcaatggctcagcgggctctgaacacagcatcaatggcaggaggtttcctgttgaggtgagagaaagtcaagatctcaacgtgtagctgtgcttcggtctttatgttaatcagatgctgtgcccttaccctcagtcattttgcaaatcacagctgtacagtacctaacttcctctctctggaaaccctttatccatagtatggcaggtgggtatccatccttgtttctcacctttgtttaactggagaaacacagaagccacaggcatcatggtttgagtagactcactactggttgatgatgttcatcatgtgtttcatttgacacagtttcttttcactgtctgttcccatttttgaaaggtgacattttgtacgaaactgggttgacttcattttcacccttaagaaaatagaaaagttggcaacatgaagaggagtctctctcagaaccttctcttggtagcaaagttttaagttttttttgctctcactggctgttgaaaaagaggctgtggtggtatgagtcactgttaattttgttaggattgatggtgacattttgcttctgctgtgtcagtcttctcagtgatccatcctgctggacagaagaagggtgtgggtgcactaggtcagatgctgctgtgtatctgcttagagccagggtgagggcgggagcatgtctccaactcctttattaatgttgagtagggacagcacatctcttccaatgccaaccttatatatttcctctaatcatgattgttgtgtgaatattcttttgttgtgatgaacatgtttgtttcttggtaggtcccccatgtggtaagccttagaagtgtgtggaagaacaaaatagatgtggttctgaaacctgcccaatagtcctatagacagttgctttggataaacatagaaattgacccttctgctcttaaaactccacacttatgttttatttgagttccttcctcaggaaaggaccttcaggcctctcaaaaaagtatcaaagggctgaagttcaccagaccattgcaccaaatacctccttgcccctccttagttcttgttttcttacacattgttacatttcttccttgctatataaatctctagttttagtcagtcggggagctggatttgagactgagcttccatctcttctctcgactgcagcacccgattaaagccttccttggcgatgcttgtgatctcagtgattggctttctgtgcagcgagcagccggacctagaccgaacccctggtgtttcagtaacagttccagccgatggctgtattcaaacatggagtgacttttcactggtaacatatgttaatcaaaggagctgcatggccaagaaaggttttcaactgttagaatttcatagcttctacgtcttgtcctgctttgataatctgatgaattcttgagacccccttcacaaagaagacacatgcatctatctacacatagatttacatgtaactgatagggtttcgtcattctccctagctcctcaggcccatttttgaaccctctaagtatcctggaagctctgttgaagaatctctacacaatatgaaagtaatgtttatttttctatagatgcttatatggccatgtatatttgtttcttatccactgttcctggagaaaccagagataactactctgagaaaatgcttcatgttttttcttgtttagctgacaaattctcagtatcagaattcttcctgcattaggactcctctatctgtgggacttcctatcctagtcacaataacgatatctttcatgagttgggtttctacttaattggttctcttccacccttaaaatggaatgaatcatttcttagaagtcttagctttatttccacttggaaaactttattcctagaagcaaaattacatcatgttcttaagtgtaggattttccttctggtcttgctgacaggttcccattggcaatatgagttgaaggggtagctttgtgtccagcaagccttgctctgaagcctctttgtcttagaattgggtttccgtttgttcatttaatgtcgttttggacaaaagacctgtcctgaaagtttaaaaacttaatcagatggctaccttggaaaagaagacctctagagctaggaactgggaaccttgcctctgtgtaattacatttcctcatgccaaaaatggccagtttcctctttacatttgattctgggaataacgtatcaaagacattaatatccttttttttttttttttttttttttttttgagatggagtctcactctgttgcccaggctggaatgtagtggcgcatgatatcagctcactgcaatctccgcctcctgggttcaagcaattctcctgccccagcttcccaggaagctgggattacaggtgtgtgccaccatgcctggctaatttttgtatttttagtagagacaaggttttaccatgttcgccaggctggtcttgaattcctgacttcaaatgatccacctttctcagcctcccaaagtgttgggattacaggcgtgagccaccgtacctggccagagattaatattcttttgaaacctatggcttttgatgaatatttcagttttacatttctcagagggagccattgaattcagaagctaattagaaatggcagccaccatgcccaggcttattgtttgaccaggttgtttggatgtttttcttttaagtaatgtcagatggtaaggctgcctatatcaattgggtttctcattgaggtccatctgattcatagcttgatttctaaaaatgtgataaccatattaatggtatatttggaggaacttgaatttcagagattaaataactgcattaaatttaactttaaaatatgcacaagaaagttgcttgcctttgcccaaagtgtgtctgtgatattttatgttaagttgctttatttgagctcttcattaatacccatctctccctacgatttttatactatttgagcatcttacgcttggtttatttcttttcatataactacattgttttccatataactacattgttttcattcttaaaaactagaatgaaagtaagaaaatttaatttatcatggagcaatttatcagcattgggggcattaattatttgtcttgcatgcagtatgtatgagggctacagaagaatcattgttgaagattgtactaggattggtagagtacagctatggttctgagctggggtcagcatctcccccctgcaccctgggacattaggtaatgtctggagacatttcttgttattgccattgttagaagtgttatggtattactttctagttggtagaggccagggatactgctatacattccaatgtaaaggacagcccccactaaaaggaatcatccagccccaaaatgtcactagtgtcactgtggtgagattctggagtggagaaagcagtgtgtttagtggaattaagcatttctttatctaagtagcatcatttaaaatacatttgaataaagaggacttgtttcttgggaagtcattccatcctctttggtttttagagagtaaatgtaccttgccttatgtgtaacagcattgctgttcctggtttctttagtatctacttgagatgcagtcacgaccttgggaattttaacagctccctctgtgctgtggctctgcaggctgaattttaaacatgtgccccacaagaagctggatctgctccctgagggtaaatggcagcaaactcaactttgtaggttttgttgcttcccaggaattctttgaggtcatctgagacaactttgtaggcatccagaaattaaagctctctgaattttcctggctggaatcctagactccgtcttgtagttcctacacttaaaaacatctagtctaatagttaacaaagaaagcccttgtacaaacaaaacaacaaaacaagacgaaagctcttcaataaccagtgttctttacagctcagttaaagttagaaaagaaagttgaagtcagattacaatgccatgccttggagactgaactcaatttggatcctcagatgccctcacctcctgttactgagctttattccttgcctagcagcacatttttcttgagtatcttctgttgtacctgtgctggtacacaaagataagtcagaaagtcacagttcctgccttcaaggtatttacactccagtggtgacacagaaattaaacattggtcatgtaaatatatgtgcaatttcatttgtgttatagtctgaagtagagggacattttgataggggatggaagctttcaatggagacatggatacttattagacggaaaagatgagttggagcttcctagtagaataaggatatgcaaaagccctgaggcaggtggtgtttgttaagtttaaggaatagagaggccagtagagattttggtaggcaagataatgtctcttcttccaaatgtctgctgtaaatacgttactttatgtggtacaacagactttgcagatgtgattaagtgtccttaaagtaaacaaactcagaatattccagtcattaaaacaggatgacctgtttcagttcttctgtggctactcagctttctgttgtctgtccagccacagttatctatgacagcttctatcgtatcctaaacttttttcctattccacactcattcctgttctgtggttggtaacttaaataaaggttcatataacactaatagaaattgaatcatgctgtatttccactaataaccaaagttgcagttaatgcaaagagaaacctccagataaaacctttgagaactccattaaagtggggggttcattgcatgcttgttgtttgaggtaattaaaatcttatttatgacaataaaagatcacgggagttgttgattcagacttactggtgctttatgagttgaagtcttcaataagcttaaatgatccaaattgattgtatgtgccccttctggtaaaagtcacagctggttcatttcagctctgttcagagcattttagtgaatgaatagaagcaaaggcatttttcctaatgtataccatgtacacgttaccatatggtacaggtctgcaatcccttatctgaaactcttgaggccagatgttttagaattcagaatctttcttagaaagttattatagcccagcggtccccaaccttttcgacaccagggactggttttgtggaagacagtttttccgtggactgggtggggtcgggggttcagaatgaaactgttccacctcagatcatcaggcattagttggattctcaaaaggagcatgcagcctagatccctcgcacgtgcagttcacaatagggtttgtgctcctatgagaatgtactgctgctgatttgacaggaggcagagctcaggtggtaatgctccttgcccaccactcacctcctgctgtgcggcccagatcctaacaggccatggactagtactggccctgttggagcccatgtgccatgtatatttcagaaggcaaccagtaaggtctggaactacacccttaaattcattaatattcctataacgagcaaatgaacagccatgctaagtggaaatatcagtactctacatagcttcacatttcttcatatctggttttaccaccaaattagtttttgtaccaaattcataaaaagaacaaaatacctttttgtcttgaaaaagtatccagggccattgtatgggtctcatgcctattgagtgacttcaatgtcttatgtctaaagagcactgctgggtagttacaaccatgacacaagcaggttaaatcatgtgtctccctgtggggtggatgtgtcccagtacttctctcttcctcctcctgtctttgtcttcatattgtgcagcattcttaggcaaagttcaggattgtccagccagaagtttctagttttaggctgaccttgttctgtgatcgattctcctttgaacattctgtttgggcctgcaattgtcttcaatatccatgtcttcaggtatgttaccttgacctcctactgcactcttctcctgtctgctcaaatcctgccttcctcctgagagccttcctaatgatttgccatcaattttatgaagtcgatcggggttcttccctggaatacgtctgtcacattttggttggagagttgtcttgtaatgacccctaggttatggctcaggtaagagaatgtgttccttgtctctggtaagcacgtccagttgtgtcacacacataaaggccttgcacagtgccaccctctccacactgatgcaggcactcaggttcctgccttacttagatgtggaccagcctgtctagggtttgaggcccacatggatcctgagcttcagcagcatgatatgttaaagcctagactacatgtcaggttgggtagcaccgcttaaataatccctccttcactgctggaataagtttatgtatacatatttgtatgcatgtatgaatgacaaggtcttactgtgtcacccagactggagagcagtggtgtgatcacagctcactgcagcctcaacttcctgggctcaaccggttctcttgcctcagcctcccgagtagctggggctacaaccacacaccaccgtgcccagctaatgttttttattttttgtagagacaaggtcttgctatgttgcccacgctggtcttgaactcctgatctcaagcagtcctccctcttcgccctcccaaagcctgggatttcaggtgtgagccaccatgcctggcctggaaataagtgtgatggatgaaatactttcttgaagatttatttgtacattggcatattaagggctttgaagagtcctccgctgaagaatctgtttacctttgtttaacacaatgttttcccaaacttacatggcctctgtccctctcttcttgtgtgtgtgtgtgtgtgtgtgtgtgtataagttcataatatcactgttttggaaatgtaagtttatacttttctcctctcaacctttagtccatattccttttaagaaatggggtcctgttcaaatacattgttgttttggtttcttttccttttctattttgtttttgagatgaagttttcctgtgttgcccaggctggtagtgctggctactcagcagcatctcatgagcccaggagttcaaggccagcctgggcaacataatgagagtctatctctaataaaataaaataaaataaaaaataaaactataaagacatcttggcttgttcaagaaacaattttttagcatctttatgaacttgatgctatcttgttttatcattagaactgtcatcagagggggtctgagatattttctattaaaaataacatttccagtataacagtttttcccccgtgttgtgtactttatgtcagttcctggaattattacaggtgatgcacgatttttgctcctttagctaagcaaggtccaggttcttgtctcatgaccaggaaaaattaggcacgtggacaccagagagtgagtgcagtagaatttattaagtgaaaggaaagccttcagcaaagagaaggatcctgaaaaaatggtttccggttgcccccttcccagttgaataccctggcttgtatctaaaaaactgatgaggctgggttccttatttgtatatggcgtgaattcctggtggctccaccccatccttccagtgcgcatgcaggcccttagactgagctgcttcatattgatttatttccctcccgtgcatgtgttaaggaattgaattgtccgccgctggcatatttaggcaagctccctgtgcaggttcccttatctgcacaaagtatctggtgtaaacacatggggcgggtcggaggttctacgggaacccttcccttactgtctgcctatagaaagctggttaactcctttcatagagtctctgaaaagtttcttttttcacagagtcctttgtcatgaagcttaagacaatgcctgttttctctgtgctgcctcttcatggagcgtggacgtgttagagagatcatcccatggttatctggtgtttgctattctgtggtgtagcctagtagtgacttccatcaaatgggaaaggaattggttgaaatttagttaatgactttattgaaataaagattccatttcagagcagaatgtttcatcctttgctagtgaaatgtttaatttccatctggctgatcttttatgtgtatgtcctgtgttaattaagaggaacatgtgaggatgccctagtacttagagaatactcagtggagaagttaatgcctggttgtgcaaagcaagcgtgcaagttttgtgaggtaaaacagctttggtccctggcttggtaaatctccatgatgtctggcagtcctcatcgcagtcatccttagacaagaacttggctcagggctgtttgatggtgtgtcagtgacacgtggtgtgctgatagctgtttgaatcataccaaaaactacagtaaagaagatggcacactctgaaaagaaaacctggttaagttggagatactctcagtgtagaaacttggtgaccgtggtggccctcacaaccatatagaaggcttagggtagtggcggttgtggttgaagtcactgatactggtgttggtagtggtaatagtgatgatattgtagatgcaatttaatagacacgacctatatcaggcactttctagatgtttcttcatgtcaaccttgtgagagagggactcttcttatacccatcttaaagatggaaagactgagcttctgcaggcttggctgagacttcctgttagtactccagaatctgggctcgaatatctccaacaccttaaccataattggttttattaggtaagtaattctgctgtttttcttgtcattgttttaggttgttttcagaaccgctgatgcagtaggtagaagtcattttttcagaatcttaactgttgcttattgtaccagttgagtgttcctcatctgaaatgtctgggaccagaaatgtttaatttttaaattttttttatttgggaacatttacttatatataatgaggtttcttggggataggattcaagtctaaacacagaattcatttatgtttcatatgccccttaaatacgtagcctgaaggtaattttttataagttttaaataattttatggatgaaacaaagttgtgagtgcattttcattgcaacccgtcacgtgaggtcaggtgtggaatttcccacttgtggcatcatatcagagctcaaaaagtgtcagattttcaagcattgaaaagattttggatttttaagatttgggatgctcaatctgtatcgtaggaaagaaaaaaatgaaagggcttcaaatgttcagagatggctgaacctgtagtaaaatatacagagagatacgaagggaatagaaattagtcagcacttatgcctagagctatctgtgcaaaagggtatactttttatctggattgaccgcttcagtctatttttaatcactgagagcaatactatctggtaaaaatataatgtgaaccatacattgtcactttaaattttcagaagcctccttaaaagaggtaaaaaggaagatattattttattttattttaacaaatatttttatattatacaataatacaacttaaacaagaatatttactataaaagaaattcaatttcagttgaattaatctgtttccccaatacattccaaaatattgttttaacataaaatcaatataaaaaggtatcgctgagacatagtacattctatttttatactatgtccttgaagtctggtttgtattttacagttactaccatactaaaacttgcaaaactttttgattccagaccacaataatggaattttgataataaactacatgagagactaacaaattctttaggaggtgtttttatgttgaatttttggtaattttgacttcttctcttccaacggcggcaacaaaaaaggtgaaaggatagaaagtagcaggtatgtacagtgaacaaatctgaagaactaatgtacagcagagggactatagttaataaaaatgtattgtatgcagtattcaggatttttgctaaacgtgtggattatctctgctcttgcagcagggcttgggtagctatgggaaatgatgggtatattaatatgtttcactataatcatcattttactatctagattatgtacctcataatgttgtataccttaaaataaaatttgttttaaaaatacacatatagtagttcagttttatattggaatctgatttatttattgaaaaggcttcacttagatgctgtacaggtttttttttttcttcttctttataagctttaacttttttcctcttattcttttttgcaacatttgttcctggagctttgaacactattcttctcagaatccacttccaagctcgggaactcaaataaagctggctggggagacctttgtgcactgaaggtagagacttcaggccgccagatcagatgtattgtaagttcaggtcaagaggatttatgggcctgtgtatcagcaacaccaccaactgcctttttctcttgtcctgtcaaaatttgagcgggaaggtttcaagccatcttaaatctaaagcctttagcaagttctttagtgccaccgtcactcagaagggacagtcagaaagatttataaggaatagaagggagtcaagtttgaaagaaagtctatttcctctcttccctttaaatccctggcatagaatttcattgcaccccccctttaatggaatgggaagaaagtttcaaaagcttctcagtccggattgtttggcctggcgctgtattgagcacggatactgctctggatacgtttactgtgatggatggagaccagctgggcaaatttaccaaaaccctatcttatttaaaaatataaatttcatctcttgagtgttggaggatgtcttagcaagacagggtactttaaaactcaggttagtatgtggaagatatttaggttaatagtaaaataacttctaaatcccagctattaccacacagatagagcttcaactcctgaatctccctattaaaaccttcactctgttcatttctaaaattcagtatttcagggaattttctgagttcatgcctctgtgttcagcatgccctgattagggaagacttggagtgagagaaacctcacgcactccccttgctatttcttagcctgcctctgtgtttgcttctttgaatttgtctttgtctctgattgcctgtctctatctctttcatcatcattctttgtgtcatttattggaagggtataagtgggtactgaaatacctaagcatatatagtcagcacccatcgaaaaagatggccccagcatattttctggattcatcttattctatctaaattatctgcctaaaagttgacttaggaaatgctgcatgacatgtcttcctcttagagcttgataatgggctatcacagtcctgagacatattctagggctaacatagtcctgagacatattccagggctaacatagttctgtgacatatgccagtagggaaaccccaaatagttcagtggagagcttttctttcagccatgatgccatgataatacagtatgtagaatgtttaaattatttccttactggcttctctagagacatttctaaatgacgcacagtgtttattcatttggttcattaacagagccttctctgtggagggcagagtgtcctggcctcaagaggctttttcttcagcaggcactgaggccctgagacaggagcctgcctggcctgtttgaggcagaggcaggaacccggggctgctgaaacagcaggagaaaggagcagagtgataggaggtgcggtcagcagataggcagtgtgatggtgtgaggtcttggagaccatgggaagctctgtggcttttactgcaggcaagatgggaaattgttagaatgttttcagcagagaatgttctccatctcagtttcctaacttatattttttaacattttattttaaacaaaaaaaatttttttttacaacccaaggtcttgctgtgttgcccagtctggcctcgaactcctgggctaatgcaatcgttccaccccagcctcctgaacagctgggactacaggcacacaccatcacaccagtctatctagtttatgttttagaaggatccgtctggctgcacttgagagtggggaagacctgtgggtgctgagagccaggctaggagataattgtaacatttcaggagagaggatggttgggtgggccacagaggagtgttttgagaaaaacatctgattccaattgttttgaaggcagaagatgctcgtggaggggatatcatgttgatgttatctcagggcatgcggtttatacttcttggtttaaaaaaagaacaatttgaggagagaaaatcatggacaacttaccagtcagtaagttttttaaaagtcttttaaagctttgactatccagtattcaaatcttgtgtaatacctattacagatcagttttcactgcataatatgttatatactaaagaatgtaacatagagaagtgatcattaagcacattattaatagtataaaccccctcctcatagagtaaatttgagttaatagacatagagtactttgagcaggatttggcattcttacagtttatttatattaactatatatatttttaagacctagtctcactctgttacccaggttggagtgcagtggcatgatcttggctcactgcaacctccgcctcccaggttcaagcaattctcctgcttctgcctcctgagtagctgggattacaggtgcttctactatgcccagcgaattttttgtatttttagtagagacggagtttcactatgttggccaggctggtctcgaactcctgacctcgtgattcgcctgcctcagcctcccaaagtgccgggattacaggtgtgagccaccgcgcccggcctgtattaactattaatatgaactcagtagtcttcttgtcacatgaagcaacagatccccaatccatctattttgtttcttttccactatttctaccctgattcaagccaacaccatttctgacttcagtcattgctatagattctaaaaaaggtctctcttgcccttcacaatccactctttatccagtaaccaaagctttcttttaaacacttggattgcattacatttttccctcacttaatattttccagtggtttccaatcacatgttgagtaggtccaaagatcttaccttggcctacaaggccctagttgacctggcttctactctccctcattcacccccacacttctctccaccctcttttcactggctttgttcttctccctgattatccctcactcctttcctaagccgtcttatcatttcatgctctctcctcttccaaagtaagtcactttcttttctattacccagttttattttcttcatagcattcatcacttttttgaagttatttacttattgatttctttacttatttattaactccctccccctccctcacccccgtatactgcatgtgagcttttagaggaggggatcagaggaggggatcggtctgtctgtctactgttgaatcttggctgctaatgaacatagtcccataacagcgtaagcagtgttacccattaggaaaccagcattcttgtattgtattcttatcttgtgggcctgctggtttaaagggtaagaaactctaattcctgagaatgaaaacttttaattcttcataaaaagaacgtttaagaaagcaaatcctaccccaaaagtatgtcttgtattaagaatgtgaaagagcccagtaaattagttactcccaaataaacacattcatcctcttgcctcatgctgtgaggctaagcgttaatcgtttagctcagaaaatgatttttttttttttttgaggcggagtctcgctctttcgcccaggctggagtgcagtggcgctgtcttggctcactgcgagctccgcctcccgggttcacgccattctcctgcctcagcctcccgagtagctgggactacaggcgcccaccaccgcgcccggctaattttttgtattttttttttttttagtagagacggggtttcaccgtgttagccaggatggtctcgatctcctgacctcgtgatccgcccgcctcggcctcccaaagtgctgggattacaggcgtgagccaccgcgcccggctcagaaaatgatctttttaaggtctgttcttccagagtgtagctcttatattaacaaccattacatccacatatcaagacagattgtttcaattagtcaatgaggcccacgtttttgagagctgttaatatgtacatgagcaattactgtagcagagttaaaaggtgtgcctttgggaattttagattgagattatcagtttcattcatgagccaagacagaagccatgagaattgtatgctgcatttctctgcaggtttgttcgctagaagcctctccagtgcccacactccaaaggttatgaagttgccagattcctttccttggtccagtcctcataccatctcagaacagtgccttcctttgtattcattgagaaccaggcaatatgctgaacatttgggagtttcatagtgaacaagacaagcaagctccttgacctcatagaacctgagagaccaacagagtgaatcttaacccaaatgtacatcagaattaagtgggtacttttacatgttccaaagccaaatttgagtaattttcgttcattccttattactggtaaatgaaaagaaaaataaaaaccttcagctgacagtctgcttttccacgttcagataaaaagccgtgcatctttaatgtggatatgatgcctctccattgtgctcaatctcaccgtttcccttctaaagtttactagaatcccacaatgtcagcaggaactggagtcaaataatagatgatttgtaggcttcaggggtgtcaccactctctttccagttggccaatcctctaaatgattcgaagtctccaagttagtctcaaaaatgcctgaaattccattatttgagttaaggtattactgcctcttcaaatggtagtctaaggaaagagcaaaatgtaagcacttgaactacattgaatacattaataaaactcatcaggtaatgccccagcagtagcattacaaagctcaaggcatcccttggaataggatgcataggaggtcaactctgataggacaaaatgtgggcaggtctacatgagccacatcccggggaagcaggaggacccacccacagttatggtatggatcagtgtatgggttgggagaggaagcattaggtatagaaggcacgctggatttatgacagacagtaagtgagcctgccccagtgctagaggaaatgattggaatggacagtggtgtgcaaatagagtgcaagagtgggtcttgatgtttttgaagggatcctcttagaagaaggaatcaacttggtctttggggtcccagaatgaaaccaggacctgcagaagctgaccttactgaagaaactggttacagctggggcctcagcacccaggctaacagcaggagctaaccaggtgctcatctgtttcacataattcagggtagattttctaaaatcaaattcctgaggtccctctgcgacctcctgaatcagatgttgaacagtaagagatattccccatacttctatcaaaaacaattcctcaggccggatgtagtagctcacacttgtaatccagcactttgagaggccaaggtgggtggattgcttgagctcaggagtttgagaccaccctgggctacatggggaaaccccatctctaccaaaaatacaaaaacttagttgggcgtggtggcacgcatctgtggtcccagctacttgggaggctgagaagggaggattgcttgaactcagggggtggaggttgcagtgagctgagattgtgccactgtactccagcctgggtgacagagtgagaccccatctcaaaaaaaaaaaaaaaaaaaagtccttggaagaataagctcaggagatctgttgtataacagggtgattataatgaatgacaatgtatacttgaaaattgctaagagaataggttttaaaatattactgccacacacacacacaaatggtaagtacgggaggtgatggatgtgttaattagcttgattgagtcattccacaatatattttgaaacataatgttgtatgccatgaatgtgtacaatttttatttgccaacttaaaaaaattaaaaacaaaaactcttacaataataatgatagttaactttttgaaaactacttcctgtgtatacttagagtacttaacatgcattgtgccatttaatcatcacttattaaaaacatttttccacaaaaacctctatctctatttttcagataaaactgaaggaagagaggtcatccttatagaaatctcggtggagtctaacatcttcttgatagaaataattttaggagtatagtagtctgagtttaggtaccattttctgttgatcatagattctgttgatcatagagtgatctgttgtcattttgactcatttccttccagtacttggcagagggtagggggagatgaaaacatagtcaatatcaaaatgaatatgtttacagtctgctttatcactttgcatattgtgaatattttctgtattttctaatatctctcagttcttcaaaaatgaaatctaattttcctacttgtaccttgctgcattctacagatttttcacaattaacacactttactttaaattcaagaaaaaaaaccagaacaatgagtctcatttaatgtcatttctaagaccttatttttgtaagctagaacaagtatagaggcagaatataaaaataattttttctcaaaatgcaaattgtttatggtcttttgattatcaaagtaatacatgttcattacaaagtaattcacacaatatgtgagttaaagaaagcgtgtgtttctcttgcaaacaagtaacactcttttgaaatgccaatatgacttcataaacttatttccacttaatagataatgggagtcttttcattgtcagtaagtagctacttactgagtctgtgactcagagggcagcacccaggccagcagcaagtacttagcaggggcttatttctggttttgttgttgttgttgttgtttgtttgtgttttgaggcagggtcttgctctgtctcccaggctggaatacagtggcacatcacagctcactgcagcctcgaactcctgggctcaaggaatgtgtcaccatgcacaggttttttttgttttttttttttggatacagggtcttgctatattgcccaggttgatcttcagcccctgggctcaagcagtccttccaccttggtctcccaaagtgctgggattatatgtgtgagccacagcacctggcctcatctatgttttttaatgctgcatagctgaggcccttgagccagatccctggggttcatatttcattactgccactgtgtgagtacgactctggtcatctgttgaacttgttccctcatcagtaaaatgacttttaatacgaatacctgcgtgataagagtttttgtgggaattaaactgtaatacttagaaacgtatagtttagtgtcacatagtaggtgattgataaatttttgcttttttccatgatgtggatgcaatacattgttggacctttcggctctttctgttggtctgtcttataaacatcacagctacttagatcatatatctgggataaacttaggtttaataggagccaggtgtatatgacatgaagatgaaaggtaggagagatgtctaacatgctatttgactggttgacatttgagaatataagccaacattagtcagaacatctgacattttcaaaagaagctaataacttgtttgaaaaagccaaaaatatatgtttatgtgtatagtataccctttttgttaaaatacaatacattgtctcggccttcatgatgtacttatgggctagaattagtgatcagtcagggttttaaatccagaatgtttcatctcaaagtggaagttctttgtgttacagtgcgcttgtctacctttaccttcgtgaattgagaagtttgggttgctatgctaaaagttaattcatttgatattatgtgatgtagctttatatgtcagctctgaaactgtctataataatagtgactttctctcaccagaatgcaatatatgggttcctaatatggggctaatacatttcttgaaattatatgtaaaattttggccatataggtctttttccttttctttttttttttttttttttgcattccatgttttgtttagactttctattgttttctgatttcctttttcccttccccctcaaaaaagaaagtgtctggagagagaggaacagactttttttctgtagaactaatttgtcttttactttccaatgtagagaatacatatatatgtatacaatttacgttaaattttattcataacctcattactggtctcatgaatttctagaggtctgaaaactcacagccaaggctgctgtacgtgactattccgccagaatcctatgggcgggtaccattgctgtctcattaatttctgtaacctcagtgctgagtgtagtactatgtatgttataggtgacctatttacattttttgtgaaataaaagaatgaacccactattatttgtcttaactaatttcaacatgtgagaagtcttccagcttacgtttgtaagaactagatcataaaatgtctgatcttttagttaaatctagttttggtgctaggacttggcagaacaataccagtatctatgggcattttgttttgacataactgactggcagacataatgcttgtcaccttctcttggctcaggagagggtggaaagttcaacaggttttacccaacaggcatttttcaatttaagtagattacggtgtgaacgatgcaggtagagatcagaactggcagggaactgggatttgaatagggccttcaatttatttgacatatctaatgttcttatgaatggggatggaaccctggtttttggtgataggtagaaagattggctcccagattgatagcgtcttgggtggattagtaaatcgatttgttaagagctggaattatataccttttgggtctaaaatttacctcacaacagcttaagataacaaacctactgccccttgcatttcaaaggtattttgtatagaagctgtaagttgcttttctgtagaactactatttctacaaaaataaaagctattattttactaaataaaaattggtaattgatttcttagtgatatattgttcatctgaagccttttatttttcttgtctgttattttaaaatttgttcttcaattgtcttattgcgtgtttattaaaacaatataattaatacattcaaaacaaaattaagaaaatacatcaccaattaattaaatttgacctcaaaaggctgcagcttacctttacagctatatatattatgactaaattacttgttctaaataatgtaatgaaacagaaaaaaacaataatgctaacaatgcatattatcttatgagttaattatatttctgtgttatatttaaacacaaccttgaattaacctcagatataaatatattaatgaacagatattgtggttgtctcccacataatactaatgaaaacatcaggaaactagaacttttccttagccaaagatagaattaatcaaaaacagacttatgatgaaatttacctcaactcttcattagcagtgttactatgagtgtatatctctctgtgtatatttgcaaatttcagccaaagaccctgtttttttcactcctctttttaccttcttgctgggatttctccagtcatttttcttctaaagttgtaagtgctccatctggtttggagcctttcttattcctatgcactcctccaagtatatttttgagtatgcattactttcctctctagccatcatccttgtttactcctagacaaacaaacaaaaatctttttcgtgcacagttaccaaaaatggctaaatttagattcatccaacatctgcctttattacggatatggaaacctagggagactgttgagattccaaggctacctggcaaaaccaagtcttaaatgcgaagagattaaaacctacctactgttttgaggtgagcattaaagaaggtactagttgtggcagtgttttggaacatagtaaaccctcagtaaatatgaagtttttcagaaatgctcatgagaacatgagatgttgtgcagtaatccttcaataatggtgttattgtccacattattgctggggaatacttgaatcctcaatgaaaagcttatcttaggatgtatcctaattgttttcttagacaagaagaggttcaaaaacaagaaagggggtctagctttctgtcattattggaaagacaagtgaaacaaggctgttgtaagagtgtctgtttagtgtagttttcttttttaaattttaaatatttttttgactgacaactatgtttatggtacactacatgatgttttgatatatgtgtacattatggaatgtctaaatcaaggtaattaacatacattgccaactattttctagatgttcacttccaagtcctttttgtgttaattcagtgctttggtttaacccaacctggtaatagaaaggaataaatttctccatttatcaagatacttttacagaactcccatctccccacttgtccatgatataattattttggcaatagtgataatgaaaggtcactattttgtgagatttttgttaaagaaaaaggaatagagcatacactttttaatgccaggtaacttcaaaagaatatttgacactgctactgtgattaagtgattttaattttctactccatcacgcttaggtagcctgcacttcctgtatttaagcagaaatggaatggaagtaagtcaagtcagagttgatacgagtttcactagctatgggtaaagtttccagtttattcccttctctgtagaatatttttggccatttcttcatatgtcaccctttcttaccaagtgggtttttaaagaaagtaaacattattggatgcaggttttccttctgcaacccctaatgtgttatctgatagataaggatggtttaactaatgaatttacttaaatcagtagatctgataaatgctttagacttgacttcatagtgcttgggtttagggacataaatagggctgtgttttgtgaatttcgacatgcgattttccaattcatcagtatcagataatgggaaattatttaccacattttcagtaataatctgtctttcgaagcaggttgctgcctctgttgtgtcgacctaaccctagcaatttcttgtttgttggcataaaagttattttccaggagtatgaaagtcatgcttgtgaccccagttagaagggagagctttatataataggctgggagctggtccagttttcgtatgtgggcagtgaagtcagagttagacactgcaacagggagtgggatgaaacactaaaaatttttaatatgtggtgtcttagctgtcactacccacctcagtgcttaagaaatgaactaattgttaaaattataggtctgaatgcatgtatatatatagcaacacatatttttgatgcagatgtgttaatgttactatggggaattttgctttacattttgctttggtgttcgagaaaccttggcaaaaggactgggaaggactctgagagagcttagtgtttgtgttcctttatctccaattatttgtttggaattttcaattaaatataatgggaaaaccatttttttcttcagtttttttgatgactacttttcttattttacagtaaccaaattttcatctatttttttaaattgcttgattaggatctcaaagggttctaaggttttgttttgttgacagccgtaaaatgtaaccattatggagtaatttttttcccttttaagtcttttcatgtgacctcaatttttcaaatgttttttccctcaggtatctacctgtccttaaaaattgccaagcttcagaacaattcttttatgaactaatgtaaaaattgtaaatgttttcacataaaggcacaataaaaaattatctagtttgaaaaaattgtttaagtaggctctgtatagtcttcagtgatgacctaactaatttttactagagttagaagagaaaatctctagcagtggcttccttacgaattggcttttagaaggcaaaaccatttttatattctttcccatattttactgatacatttctaatcacaagtttttgaaaaggttaatggaaattgcaatgctttattgtcatgatgcttaagtgatttctttttcaataaagggtatgttattaaagagaaaaatgattttgcgacctaggcattaaagtatgcagtgccatctgtcttaagcctgggtaatcaatggtgtaagtgaggccagtttatttctcatagatttactagcatcactgcataaatagccataatggaattgatttcttaggctgaagcagcttttatcacatacaagggtttgatgatgactgtattaaatgttgacctttgattagccttagtctttcttggttacagaggtcttagaaacttcatgctgaaagattgaaaatgcaatgttcttgacattcaagtgttttttatattaactacttgttcttattttttacttcctagacaagctcttatgttccatgtgtcttgattgttctgtatctcagtaaagttttatggctaccatgggcacctcccttctgatcacccaagaggcacaaagaataacacagtgagttagagcatgagatttgaacccagacacgtgtgcccaggtttgaatgctgggccctgtactgctgcctgcatgacctagacatgtaactttacttatgcaagcctcagttttctcaccttaaaagcatgtattagaggccaggcacggtggctcacgcctgtaattccaggactttgggaggccaaggtcggtggatcataagatcaggagatcaagaccatcctggctaacacggtgaaaccccgtccctactaaaaatacagaaaattagccaggcgtggtggcacgtgcctgtagtcccagctactcaggagtctgaggcaggagaatcgcttgaacccgggaggtggaggttgcagtaagccgagattgcactgctgcactccagcctgggaaaccgagtgagaattaaaaaaaaaaaaaaagatataagaaaattctgcttagattgttgtgtaaaacaaaacaaattgtgtattgattgtacctggcaagatgccagacatatgggcaaatgaataggagcaattattattgtctgctcttcctattgttgttactactactgagtcaaatcatttagagtcagtatagatattctctgtttaaattctctccccgtgccctgttttcttttttttaagcatagatcccccttctccatggctagttagtagaacaaactggggatgacgcttgttacattaatctaaaatggtttttctgcaaatgatttaaaaatcactaactgatagtgtggagaagacctaacttccaggctgatctagctctgaggaacattatgagggcaagaaagtctttgtcccacccaatgccgtgtctccagagtggtgtcccttaaactgacctccagtccctatactttattctgatcctggtcatagaaggtgactggcggcctcatttctattgcattcctcctgccaccccaccatcccctgaaaaatgcagtgggctgtgtcagcataaatcagctcctcacataccccattcagcagccagtgtcttcagtgtttgagatcctggctgaaagcaagtgtctgcttaaaaataatttgtcgcttacctgaaaaagcctctacaccctgcaaaatctaatttttccaaatattttcgagtgccaactcatattttaagccaagcagctgacagacatttacctgtaggctagcttaatcagattttaacctagtcagaagcctagccaatgaaataaacttcctttgtgggcacagattttttaaatccatcaaaaaacgtgccccagagccagtgtgatttttttaaaaaaaggatttgctaaatgatcacccaggaaatgtgtgtgttcgtctataggacaaggccggggattaggaagagaggcactttttttgtgtttcagtaagtaattttccttgttataataaaaaatcacatcacttgttggaaatctggttggtgcccaactgctccgggcaagtgtttgcaactcgtgattatttattcctcagatctttttagatgtgttatgtgtgaatcagcccagcctgcatttaaggcttgaaaaatgttctttaggattccttggtatcaaagcatccattaattactgaaaggataagacagtggtttactggaagtcagaatctgcatgttctttgttctaaagaggagaaaagaagttttcggtagaaaggagagccacttttaaagatgcccttttaatatatttttgaaaggtatgcatttttttgtcataaagagctcttcaaaatgatctttttgtggtgacatctacattactctggaaaatattcttatgtttctggcaatgatacgctaattacagcctatacatttttaagagttgaatctgtcatattctaggagaggagtgattctgattccaaacaaaactgaaatgcatgaccaaacacattatgaaatgtgtggtttcattaaatcctgttgttcattcagtcagaagaaaattgtttagttcataagaggaataagaatgctgaggtattacgatttcatttccgtatatccacaaacctttccattcatatttaagccttgccaccgtattatgttatgttgcatgttggccatcaaggaggtcgggtcacaatttggaagaacattgttttataccaaggctttgttagcattcctgggttgcacataacagaaacacactcaagtcagcctaaacataaaaagattgtttatttttaaaatataggagtgtctaatgaaactcagtggtacaaatgtggctagacggggctagaaaggagacagaagtcttttattgtatctttagcttttgtttgtgtcttggacatttcctccttctgctgtagacagcttctcttagttggtgtcatatagtctggttcctaatgcttttttgagtttgtagattatgagttgatactcactgagagtcctttggcctaatgccaaagacccaggaacgacaacctcattggtccatcttgggtcaggtggtcattacttggtccagtccaattggctatggccatggaatgcacaacatacatggcagacatgggcctatacctgtgatcctgtttccggaaaatggggcacttagcagactccctagcgtgtgtgagtgtcttctctcacacacactaagaatgtgtgtattctgacttgtgaagggccagatgcatctaggatagcctcaaatctcaaggtcttgcaagaattctatgtgtatcttctggacacagttcagtatctgaatcaaggaggactaacacaggtccgagttagagtccatttggagacactgcttacttcattctcacaagtacatttctcactgtcacaagcttcaaatgtgcgtcccagaaaggaagagaaagctgtctattatttaaagatgggctcattatcaaaaggtgaccagaggtatctgcttacaattcacattcctagcgcacccttaaaaacgctaaaacactagatattatttatgaagaagtcaaaatatcagcatgtcctctgaaaggatgcttgggttatttatttattaatttatccatcttcattggaaaacttaccatctggatgctgtccacattttaaaaacacataaattaaaacccaaggcaaattgactacaacatgggtgaccttcaaacctcttttattccagccagtcatttcccattctgattgtgccaaaaggaggcaggatgaagggaaaacattcacacacattaacagaactgcatcttttcttcagtaaaatcaggtcttcctccataagaccttgcatttattttaaactttatattataagtaatgataaaatgtgaattatgaataatatgcaagagtaatattcctaaaataacacagtgcatttcatattgccggccaccttccacctgtcacaagacattgtccaatctgattttctaactcgcattttctgactctggttgaatgactttatacattgctttcatgattatctttacattctgttaaaggacaggggtttgatgaataaatatattgtttgcaatttgcctctatcatttgtgtatcctgaattactcaagttttaaattgcatgaggcttttagtgaaatcatgtatatccaaacacaggtttaactttatgcagataggtgttttacatatacacacagttctaaaatgatgggaaaattttccctgtgtttttttttttttttaacttaagtcagttcctgcgttttttgaactaaggcaatgttgacacattactccccctctcacccaaagcttaattagtttttcaaactgatatttatcgagcttcctaaaatccacctgccagattcctcatgaaaacagtctaattgaaatattgctttaaggaacttttagaggtagggaggaagaaaaatatgtacataagactaattagtattttttaatgaatgctacatttgcataaattgaaagtttcattctatggacttattgtagagttgtggttaaatcggcattagtcagcttgggcatgtttcatgattattggtaaagggaattacacttttactggagatgtcatcattgatcaatcagttgaccagcaagtgagcactggaggaggcatgaatcttggggtggtgggagagtcatcaatcacaaaacccagtttgggaggtgagatgcactcatggacagttaatgaacagcaaacagtatgaaatgagaaatgctgaattgcagacaagtctgaggatatgtgagtctctataatggaattaattgttcaaaaaactgaacaaaacaaggaattgtcattgaattcatttgggatgaaggctgatttgcctctggaatggggcaggaacttagactgaccccccactgcctgggtaaatctaaagcagatgctttagatttagtcaatatggatttgaataaaaatatccaagacacaatttgttggtgtaaaccaattgcactattgtaagaaattctgaaatttccactggctaaacgggcaactctaatagaacctttatggctgggaaaaggtgaaacaactggattttattgaaatgatttcagttttttaacaaaagtattgaaggaaggatgaacaaatacgtaatcaacaaataggtgtttaggagtaactgtataccagcttatgtgtcaggtgaataagatagaactcatattctaattacaattgtaatacaacaggtgacctgaaggctacataggaagaaaataagatgagtggcttacctagcctagaagcaatgggtttacttccaaagaagagtggtatattctctgaaacggaaagaatatagaggagttggataggagaacgtgggggaaatgtgtgtccagggaaaactgcagcaagccccagtgtttaggaagagagtggcacatttgcagaagtctcggatggctatggacagaatgaaaataagattaccatgatatggagaggtagacaggggatatgacagtaatgagtttggattttattttaagggagatgagaatccttcgaagcgttctgaagaaggaagtagcgcagtgagctacctgatcctggtagatgaccgggaatggggaatggatggtgggatggaatgacctgcagtgtaaaattaccttgggaggctcttaaagtaatacagctaagtgatggtggttactaatctagatctgattggaggcaggggctgggttaagaagtggactgatttaagggatgtttggcaaatgaggttgacaattcttggtgttagttatggagagaagatagagacattatttcaggggttttggtttgtgcaactaggtccaaaggcagtgctccattgagacagtgagctctgtggaagtggcgggtgtaggaggaagaggatgaattctgttttagataaatgtagatatatccagttggaaatgtctaagaaaccagttggttagatgggtctgccactcaggacacaagtcagaactggaaataaagatttgagaggcattaatatgcacatggaaattaatgccttagggctaatgagaattcctgggacagatggattgagtgtgtactggttcccctgagctgtgagttataccagccttcaatagacatcttggggaaggtagatgggcctgcagagaacacagagttggactagccagagaagtacaaggaaaacccatgttcacaggagccagtgggcacatttgctttgagaaatataggattagtcaaaagtgccacctattccctgaaagtcatgtggggacagggactgaaatggaattcagctacaagaaagctctttagtgacctttccccaagcaattgctttagatttagtcaatatggatttgagtaaaaatatccaacacaccatttgctgagcaaattgaataccgaatatactattgtaggaaattctggagtttccagtggctaaactggcaactcagtagagcctttgtggctaggaagagacaaaacaactggattttgttgaagagcattcccatttttttttttagaaaagtattgaaggagagagggaagcaacaaatctgatttagtgaagacgttttccttgacagcaggatttactcctgagttataaatttgccatgatcgagactaaaatgcagtgaaagttaaatttcacctatatctcattcaacgcctaacgtgatttaaatgacaggatttcaggagtgacatgtagctttggatctaaatatattttttatggctggaaattttaatttcagatcagtgaaaaatcatgacgcctcttcatgtgtaagagacttaaagagtggagtgttaggccggtgcagatggttttgtcaggcagaactattaatgctaaggggaatcagatggcagaatttgcacaggcttatctataaatgcgcacctgcaagataacattgaaatggttgaatgaccgacctagttctaagatagtgacatgatgagttcatcttgttttaatctcacattggatgttcaatttgcctgtgacatgctggtatagatgccctataaaagtattatatgtgtgtgacccggctcctgcctcccagcccagttacatctggaaatactctttccccttttctctctgctccagctttaatgaccttctttaaaaggccttgcctcttcccacctcaggacctatgaacctactttcctgctttgtcctacttctgagaagagtctttccagactcttcttattaaagcttcagttcaaatgtcactttcagaggaaggcttctctctcttccttgctgagatttggtatccctggtatctactctcaactgctccctatacattttttttttttttttttttgagacagggtctcactctgttgcccaggctagagtgcagtagtgccatcatggctcactgcaacctcaacctcccgggcccaagtgattctcccacctaagcctcgcaagtagctaggaccacaggtgcacacataccatgcctatcttcccccccccaccccccaccagagatagggcctccctgtgttccacgctggtcttgaattcctaggctcaagcaatcctcctgccttggcctcccaaaatgttgtgatgacaggcatgagccaccacgcctggcttccctgtacttttttggagtggatgcaaattacagagggagagagtttagtaacaactaccatgactactcttttgaggtttccagcaaccctcattgttgactgatgattcttcttttttgagacggagtctcactctgtcctccgggctggagtgcagtggtgtgacctcagctcactgcaacctctgcctcccaggttcaagcgattctcttgtctcagcctgggactgagctgggactacaggcgcccgctaatgcccagctaatttttgtatttttggtagagacgggatttcaccgtgttggccaggctggtcttgaacacctgacctcagataatcctcctgcctcggccttccaaattgctgggattacaggcatgagccactgagcccggccagctgatgatccttatggagaaaatgataatacaagctaatacaggggattggttctgcaacccccgcatataccaaaatgctcacatactcaagttcaaagtcagccctgtggaacccaagtatacaaagagtcagtccttcatatacatgggttttgcatcctgagaatactttattttcaatctgcatttgtttggaaaaagcaaaccctagcagttcaaactcatgttattaaagggtcaactgtattttaattctcactggaaacctgcggtgttggtattattttcatacacatcatgtcaggaaactgaagtacaaagaggtgaggctaccagccttgggtcactcagctagtaagtccagtgagtggtgttgatgcagttcagaacttgcgtgaggtctgattgtgcggtctcttggaaaggcagcaagctgctcagagccatgtgtgagtctgttggtagaatgtctttcaaactcttctctcttgtagtcttcctagttcgtcagttacacttagaggtagatatccattaaaattcttaccagctggtatacatttctctgttctgatggaaacttgtatagtcaggtgataaaggcattacaacggtaccaagtcagcatcgctccactcaaaagaaattttttaaatgtccgtgctggcagcggacaaggatgaatgattaaaaaataaataaaatcaaagccatggctttgatgagttttctgtatctttctccacagtatacttggccacccccgcagccagctgctggaggtgctggttcaataaatgtaatgggagcaatctcactctattacttttaaattaacttagtctatgtggccatccctgtccgtggctccttcttggggaggaggactgcaccgtattgattcaggtgatggatgggaatattaaacgttccaaggcgggacaggagtcctacagtggggactccaccaagacagacctccaggcctctgagcaagttagctctgctagatcagggaatggcaaaaccctccagtaaatttaaagttaaaatctgaacaccgagtctctgtttggggcttgaaaatggcactgttttcagactctgaatttggagaccattttctcttccccaagtaaaagccagagctagaagaaagtaacatgaattcatggtcatcaggcagggctgatatttcaaaaacctcagcatcacctggaaatgggaatagcactgtcaaatgtaaaagccaatcagaaaggttgcagttcaactttcttgccctgaaaaatgaatggggtgggttggggtgagaaggtgtgaataatcttccgggacatttcagagtagttctaacaataatgcattaaagtgtcagtagatgaaatgattaattgaatttgccttcatttttctcatttatttgcttttggtcctgtcttcactatctcctatttaagaaatacaagtattcctgttcagctcagtccctagccctgtctctgaagtcctttattattgcaaagtgacatatgtgaaaccttgccactgacattcatagacttataatcctactccttcaattgctttattaatgctttggctttcagcataaaagcaagcacattggaaaccacggaaaatttctgattatgacagtgacatttatcattctctaatggaggagctgtagcttctaggtggaaagttggcgagtgcatccaatgcacaatttccttgttttaaatgcagtctttgttgagaggagctgttctcccagatgctggataatacctaagccttacatggttgtaggcctatgtccagcaattggtgggagcactgttaatttttaactgtaggttttatgggtgaagaattgatgtcgcattaattcagggatgtattcaacatattaccaagtgctttctatgtgccagacagtgctctgtgcatttggaatgtgtcagtgaccaaaaaaaaaaaaaaaaatcctgccactgtggagcttctattctagcaaggggtagacagatacaaaaacatcataaataattgcatatgttagaaggtgagaagtactttggaaaaatacagcataggttaagggaaataagctgagccagagttttgttgggggttgtgggttacagcttaataggccttaataggccttgaaggaggtgactctggtttggaatatctcagaactgcataaggaattccagatgatgtgataaaaaagaaatccatattgaagaatatgaagtcctgggttattgcaaactgaaaatgcattcctctttttcttcccagcttctgaatcctcttttcttctgtccaagtcctggcattatttgggagcagtggccacctctcctgccactccacactgtaatgagaattggatgagagagtgcagaatgtgacatttgtgtgtgatgcttatggtttgtcatgaaatccactcaagagttaaacaagtcaagggtgttagctttaggcatgcttttgcctcacatttattggtgtttagtatgattcactgacctgaatcagttctaatggtacacttagatatgcaacttcttgggaaggaaaaagacaaaaatgtccctagtgcaattttattgagattttggtccaaaaggaagcagtgtaaataaacagcaaaaaaagccatagctaaggtaatgtgcttcaaaacaagctagaagacaaatgctaggtaattcgtaccatcctctgattaaatggccatgagcaaatcatcgggccctccagggcacactccattcctctttgttgtggctgtgggatgacacatctgtgcacagctctgcactcagaaaactcaggctcgtttgccaccacttccctacctccctcagtgctgcacgtgcgcgcgcgcacgcacacacacacacacacacacacacagtgttccctgatgtacaaaagccactaatagtaattatttaatgataataatctttgcttgcattatctaatctcccaatggctttatcagagaagtactcattttatccctagtttacagatttggaacctggagctaggagtggttaacttactgatgcccagcacacacagctagttcagtgatagggttagggtggctggccccataggtcatataaggatacatttgctcatatggaaacaagttatttttattgacatggtgccagatcaccaggttggtggaacttgtctcttgatgtcatacttcctgattgtctcaattgatgtctccaatcctcatttcttacctttaatctacctctccctgcccctgtgttctttgcattataggatgtttagcagcatcccggacctctagccaacagatgccagtagcaggtagcagccccctataagttgtgacaattggaatatctgcaggcattagcaaatatcccttgggggggcaaaatcgtctccatttgagaacttctggtccagatgttcaggttacatggacctactcttgtgtgccaaaatccaactcttcatcaatagtcaaatttcaaatccatctaggaactgtttggctgtggctgagtgtattaatctgctcctactgccatgacaacatactgtagactagatggcttaaataagaaattaatttctcagttctgaggtgagggctggaaaggcccaggtcaaaatgcaggcaaggtttcattaggtctcgcctcttatttgtgcattcctggggagacagcaagttctttgctgtctcttcttataaaggtgctaatcccatcatgagggccccactgtcatgacctcatctaaccctaattacttcccaaaggtctcatcttcaaatatcatcacactgagaagtagggcttcaatctacgaatttcaggggagtaggggtgggcaaacatttagtccttaacactgagccttgatatgttggaaggacatccagaaggagtgtcaagtcaaataggccagagctggttcatgtcccagctctattatttggacaagttacttaacctttctttgcctattttctgacctactaaatagggataaaactagtttggtctagggttttggaaattaaatgaaatgattgatcccaagatgtgtaatttttatcaggaaactaatttttgttctttttgtttgcacaatctctccctaagttggtaatgcaggcccaccttcaaagttggaaaatcatagtaaaatgagagtttgtagctcctggtgtggtctttgcagagcattcgattaagcatatcattgcttatctaatgaatagttatgcttttttctttatttttatttttatttttttggagacagggtcttgctctgtcacccaggttggagtgcagtggtgtaatcttggctcactgccgcctcaacctcccaggctcaagctatcctcccacctcagactctccagtagctggggccataggcccatgccaccacactcagctaatttttatatttttgtagagagagggttttggcatgttgcctaggctggtcttgactcctgggctgaagtaatcttcctgacttggccttccaaagtgctgggattacaggtgtcagacaccttgcccggccatgctttgtttcttaatgaccgcagttgttacagcccacccaaatgagcctatgtacatatatggagatatatatagagagattttttttttccaacttcctctattttttaatttattttaacttcaggagtacatgtgcaggcttgttatatagctaaacttggatcatggtagtctgttgtatatttagtcacccaggtattaagcctagtactcattagttatttttcctgatcggagagagatttattttttgagacagagtgttgctctgttacccaggctgaagtgcagtggcatgatctcagttcactgcaacttccgcctcccaggttcaggcaattctcttgcttcagcctcctgagtagctggaactacaggcacatgccaccatgcctgactaatttttgtatttttagtagggacggggtttcactgtgttggctaggctgctcttgaactcctgacgttaagtgatctgcctgccttggcctcccaaagtgctaggattataagcgtgagccaccacccctagccaagagttatggtttttttttttggttttgtttttgtttttttttttaaagagaagtgttgtatgtctactcttctaacacgtatatacaacttaagttaaaaaaaatttttttaagctagtaagaaatttctgggaagtccttaccatctctggtaagaagtgttttcatgcaacagggggaaaaaatatctttttttctaataaaactgtggaaacaagatgagtaattactacacgaaagcacagaatgttttccaaatattgtgatgggtgtttattctacatttttcttctctcaaggccagtcatgggcttgtacagaaatatgaacttcagttctcaattattggtagatctgaagggagtctatgtacagaactattgtttaccatcccgagaagttaatttcatagatagatcatttaaacaaatatgaccgtgttttaaatttgatttaagaatgcatttggggtgattagcgatgtagcgactcctgcagctggtgagccttaaatacgctttataaagattcctgtccgttgccagcacagctgtaaacacttggcgcctttgctttgtaacagttacagcacttgccttttttcccccagccacagagcagtgctaatcattaagtatgtttaataaaaaatatcttctcagcctccaagtgactctctgttaaatattttaaaaacttatcccacttagtgagacattcttgacattaaatagatttaataagaaattgttagtttctgatggttttcagtgttaagtattttttataggtagttacttttccagccgacaaccagctctaagtctttaatatttaaaatgttgcttttatagctgcgtcctgcatctgtgtataaaatatagcatgagcgttgcctctaaattttgaaagactcctcctaatgaacataagaagaaagcattttcattttctaagcatatttatatttcacataccaaagtacattccaagtttcacaaattggagacaatttctgcccaaatatcagttttaacatcttgtaagatgccagtaacaaaggcacacttgaaatgtacttatctggcagtgagcacctatgggaaaatgtgctgtgggtaatgatgaagacatgtaatgttgtgttccactgaagctctctaagacagtacagaaaatttcgactgtcttcaaagagtttattcgaagttgcacgtgagtccagttttattttttaagacagagtcttactctgttaccagactggagtgcagtggtgcaatctcagctcactacagcctccacctccagggttcaagcgattctcctgcctcagcctcccacgtagctggtactacaggcatgcgccaccacgcccagctaattttttgtattttcagtagagttgggatttcaacatgttggccaggatgttgacctcatgatccgtccgccttggccttccagagtgcttggattacaggtgtgagccaccgtgcccagccgagtccagcttttaagtggaaaatagagcaccggagtataggagcttgtcagagcctggtcagggacatcggggctagctgtgaacacactttgatttctattttgagcctgggtgtggcctctgcatatatagaggagtttcagcagttttgccatctttgggtgactgacttaggctatgcactggaggcaacatgggagacagacatagaggtcaagcccctgggatgcagatgaacagaccaaactttgagtcctggctctgcccacttttctttgtgaatctgagtcaagacttcaccattcagtgtctctgtctcttcctctgtaaaatgtgggtagtaatacctgatgcttgtggtggttgtgagaattaaaggagttgatacatactcaagttttctattctcggcacttacaatatattcagtgttcattgaacatttacatttactctattttgtgtgtgtgtaattgactagcagagtaaattctttgcagccatgcttcagagaaggattgacttggagacttagaagccttttcggatgccaaatttgataaatccaggagacagaacgttgtttcttacctcgtagtacttgaagaatactggcatcttttttcatgggtgagcagattgttgtcaaaaggttgagatgataccatccaagaattctagaaacacacaagacaagacttttagtctgaaattaacaaaggattgagcatgtccttgaatgtctccttttttgtaatgtgaggaaattctgccgaacctctgccttcacatacaaccttccactcctaattctgaattttagatttctcccattgtgcttagagatcaccttttggcctcttcacaacccctgcccccttccacatctgatattgtgggagattatacaggattcaagtggtgactaaaaggaacttctcatttccacctgcaaaatcttctattagatgtcatataccgagatatgacggtggtaatgatcattgtgatggtggtgatggagatgacagtcatagtgatgatggtgcagatatggactttgatgatggtgatgggggtggttgtggtgatgatagtgactataatgctggtggcttccttgtactgactatgaccatgtgactcacacagtgctgagtgctgtgcctgcattatctcatttaaccttcatcgcctcttaattctgcatcataatcatccttgtttaatgaatgattaagcatccgttaaacacccaggctttagtttacccaggattatacccagggaatggggaagtgaggtcagaacccagacctgcctcacctcttaactgctttgcatgttgcctctcagagggtcacagaaaatcttgcactgctggcacgccagttgcttctggggctctaggatttggggcaagctcagagatgcacaagtataacctggagcttccacaccagttatggagtcagagatgtgaacagtagtatttccagccttgccctggcctgtcataaagccatgcccagcgacaggtatggaataaacctgggcttcaccagtaggatccaagtgaccctgtgcctttggagtaagtccctgggtgtcccagtgtccatattttaaagaccagatatttctacagcgtgtctttgttatgccaaaaccccttctgaatttagattttctgatcttctgacagacttatttcaggtattactcatctctgattccaggtctcaccttttctttctgtatcatgaatttttaagcatggtgttcttttgcctgaaattttcttcctcccgcaccgccaccctgcatgaccatttgatattgtctcttttcctttgggtctcagcttagctgcttcatcctagaaggcttcagggtctcctccaacctccactccagttcctctactaggtgttcctgtggcagcttctcctttcatagcttctataattctgtgctgtaagtgcttgctttctcagttgtctttcttgtgagactttgagatgctaaccctttaggccctacgaatccctgtgtgctcagcatttgggtgttcagtaaagattaattccctgcttgaatgaattcattgaattcatgtcatgtttgtgtcctagaaacacatcaaggagcacaggataggaattagggttgtgacctttatcctttgacccacatcttaaaaagggtcaaatcttttacttacgtacaattaagcacacgtagtaaaaataaatttccaactggaaggtactctttagggtacaattttttttattaagtgacgtgtcaagattattgggctaagttggggtaagttcatcagtttaaaattttcatttttaacagacagaaggcatgagaaaggcaaaactcattttcctgtgctgtttaattcgatcacataaaattatctcaacaaatacaaagaagcccaatatgtttttccactaggtttctatatttatcttgtagaatcaactctatagatacacctttagtgctttgttctctaaaacataattttgtttattttcatatcctattttctctttccagctgcacacatcaagactttttaaatcaacattcaattatcactaaatgacttttctgcctatttcagaatgattttaatgtggtcatgtttattttattaaagaatttttatatctgccttgggataatgcaattagaattctttttacctttatgcgatcagtttagagcccttctcataagagaataaacaaagataataagaaggcaatatttttattttaaaagggcagataaaatatcctctgttgcaaaaggtctcttttggctctttgttgaatatgcggcaattcagagaaatagatcatatacttcgaagttaggtcatcttggttttaggtatagaagaacaagctttggtcgtgaatttaaggtttgtttgtttgtttgcttgtttttacttctgccaggtttatgattgttaaaggatagactcttgagttcctaaacagtagaaaacacaacccttgtctaaggggtggtataatctagtcaattcggaagaaaatacgtgaatgaagaaacaaagttgtcggtggaagaaagttttgaaatccattagaaaacaggacagcttatcaatatcataggggcctagtgcagatagttggcatgtacagggagctagaagcaacatgaaagactgtggtgaaaattttcaattttctctgtagggtatttggaggataatttttgctcccaatgataatggagtcagcaccctctttggagccatgaacactctctcttaacttcttctcagaacctttcctgtatactgccacaatctcaaatgcttggcattagccagaggctggagtgcaggaatctgatgaagagtgccgcttcttagccttggcctttactaactgagcactactgagcaagtcacttaacctctctctgctcagtttctctattttgaaaatggctcttggccgggtgtggtggctcacgcctgtaatcccagcactttgggaggctgaggcgggcggatcatctgaggtcagaagttcaagacaagcctgaccaatatggtgaaaccccgtctctactaaaaatacaaaaattagccgggcatggtggcacatgcctgtagtcccagctactcaggaggctgaggcaggagaatcacttgaacccaggagacagaggttgcagttagctgagatcatgccactgcactccagcctgggtgacagagccagactgtatctcaaaaaaaaaaggaaaaaaaatggctaaggaatgcttacctcatgagattattttaagattaaatgagctattgtatttaaagcatttaatacacacagtaactactcctgaaatcttagctgtggctattaataaaaataaaaataatcaataacatattgtgcagccatattgtcattattattaatatccttctaatctcagatacgtcattgcccagcccaaatgccagctcttccattaagcttcctcttttcacccattggaattaattacccttctgtattcttatttactttgtcctgtatgtttattatagcccttaatacttgatggattttattatgtatgtcctggaaacttgggagcattccttacccatccttttaatcaagactgagcatagtaattattttaaattaaatagcattgtggtggaggagaggacaaaagagtgtgacccggatgagtgttttaatttgcattcattgtaagaatggggaaggggtgttggtgtggggtgagggcagccatttcatgaaactcatagtagttgtctcagaatgctaccttgtcttagctttgcaattgaaaggtagcttagatgtccattgttgcttttcagatgatgcaaaccgtcttaggttgaatattcgctgttcaattcaggaagaagtttccccagatggaaagccttgaattatttatgcagtgtttatctctgagtttacttcccatcacaaccaattaaggctatttggtttcattaaaaatagcattttctcatttgggaaaacatttatctgaaggaaatttaaatttacccacttggaggctacaaagctggtgtcgagttagctgtaccgcccttagccaagaaacagagaaggaaacaaatgcagttttctcctcgctgtacattttttccccttttagttctttaacagacatgaactgtgtagagtcaaacctcattttgtccagctcttagatttaaatctctgcaaatcagaagcttataaatggcacagggaagtagatcttattgccctcaatgctgctgttttctgtacctgtcaaatgtccttagtaatttgttaaaatagtttaatatacatagaatggtaacagtcaccagtgccagtcattaccttgaataaaatgtgttaggtcttctcttaacaggtcatgacctgaacacaaggttctgagcatccccttcccactaattctgatggtatgccattgaaaatggcactcaagctttatcttttgtaatgcaagctttgcattaattcataaacatatttgaagtgagactagttatctttgcatgggcaaaggtgaggcaaagtgatagggccagacagaacccagtgaccattcagccaggatgtctcaatgacagtgctccagcaggggcatcatgatctagattcatctataggaggtggttgatctctccaagatgtgttctgtcccttctcttccccctgtgaggtggtcgcacaaagcaccattcccctctcttggttgttatgtgagggctgtgactgtcaaactttgggatgctctagttaccttactagggcaccctctccccactatacatcttccacagaaggccagttataacctgttaggcaagaatggaattggaggaacactgaaatggcatgatgttgatgatttgattggtggtatcagttcatttcccccagagcgtatccttgcattttctcatccactccatccattcatgctttgaagttacgtgtgtggggatggaccctccaggatttcttctgtttttctcccttctgtgtgactgtctatctttcattgaccttttctttctttagagaggtcaatagcagtatataatggaggaataacaagtaccttatgtatacacttcctgagcctgtgccaaacctcactaactgatcatagaattttttcccaagtctgatagggcttcttaatccttctcaaagaagggagccaagcagccaccaccaattagtcatcattggcatgcttgctgccttcattttatttcaaagtctttctttcctgcatttagtctgggggacttactgtctctcatcattaggtgctgattttttttttaaatcagactttaagaattcatgtatcacctactctttgaactagtcccaaacaaagatttttgtattgaaaaagcctttgagaagacatccttaagtttaaaggtagatgtttgttatttatctggattgttttgactgttgttatgtggaaagatgttttagacctgcagtatgcgtggagaaaagtatgctagtaacaactactaccatttatggggcacttacaggatgcaagactgtgcactgagctaattatgaacattatgccgttctctcaatgtgctaagcaggtaatattaccatcctgtattatggaagatacaagtggggcttagagagggtaatttgcccatgggtattagtgcagagcaataagtggaacccagaattagaacccacattttctaagtttgcaagcttcatttcaaatttcaatcatagtctttctggttaaaacatgctgtgtgatataaccccatttacttcaatattcttgccttatgctgtatttgaaagtagcttctagaatgcagggattttttggattctttgtttcacttgctgagcttcctattatttatttatttatttatttatttttattgagatggagtcttgctctatcgcccaggctggagtgcagtggcatgatctcagctcgctgcaacctccgcctcccgggttcaagcaattctcatgcttcagcttcccaagtagctgagaccacaagcgtgaaccaccacgcctggctaatttttttgtatttttagtagagatggggtttcgccatgttggccaggttagtgtcgatctcctgacctcaggtgatctgccctccccagcctcccaaagtgctaggattacaggcgtgagccaccatgcccagccccagcttcctattatttaaattgtatcctggaatgccttgctcactgttacagacttgcatgaagttcaagttttatgtaagttctctaacccattcagctgtcaccttatgtaatacgcattttcccctctcatttaatgctggatgtcaatgctgagctcctcagagatagtacatgcctcaggatggtaggaccccttcgtcctagatataaatcattccagcaggggcctttgagttcataaatgcaatcagcttttctcttcctttccttaccattccctcccccagccttttaaaaacagatttcaggtttacatttacaggatcgcaaaaaagccagcacagttatttagctccagtctgcagttaaaacagtgggatgcatagctaatttcactcatatttttttaatgtgcattagtaacctggcgctccattaattacaatatttcatattgggaagctaaactggcttttcttggaaacctgctgaaagtcagacaattacctctgcaagctacctctgagtgtttcgtatttaatagaacatgttaacataataatgctgttttatggagaagagaggatgaattttgtactgataataaaaagcccacttaaaaaaagaagaaagaaaacaaggaggtaatgaatgttgctctttcctagaattagagaaaatatatccacatgaggcagtgtctacacaagccaaaaacaggtccaggtggataatgggtattgtaacctgcttgcttgacagtttataactttcctcctacttgctgttgagtctttggggtggaagaaaatacagaacagtttagagtatatccttatttctcccaagataggtattttgtgacctctaagtatagacaaaatggatagaaagtaaatccttctgtctgggcagtggaaaactgcaatcgctatgtgtacctttacctcttgtaaaatcaggatgtaggaaaacattgtagggttatccaccagaagggcaaccttttttatataaacttatctcttcttactacctttttaatctatctcccagttgttttcagtgcctgggagtccccatgaacacttgtatacggagattggagtaaatggtgctattagcagactattgtcttcagaaaatcctagtggtcctttattctctatctagaatcatacaagtttcctgcattacataattgctgtgtcatcacatttcatttgatctgtaaaggtgaacatattctttttcccctcctgcgaggaacaaagctggagaatatgtataattcaaaaattggtccagtggaggcacataactttcatttaattaaaggcgctgagtaaagggagtttgagataagcttgaacaagtagactgctgcctgtttctctgaccttttcaaaagggatacaatatgtaactgaatattttgcgaatggagtcaggaaatataaaatagaagaaatgactttgacacaactttgaagttgataaccttgaaatggagtaagaaggtgaagatcctaaaaagtaaaaacaaaacaaaacaaaaaaaaaaacagaagccggggagaaacgtatctcatcgtccctcttttgtatccttcagctgactcagtactcaagctattccctgtccacttaagatctgtgtaatgcgagcagcatgttcactgttttaaggttataccacagattatgcatgccacttttcactggtaaaacgggttttagtttctaggagtctccattttctaataagttagtgagatgtttcgccatttggtatactgggtagagaaggatttattcagaagtaattttgaaaatcttattctgttaaaaatgtctttcccatttgaaatatttcatttgcattgtgcatataatggaagtttgctttgaatgatgctcgctgtttcatgtaatcaaatgcatcttttactcggtaactttccaagtggtggataggattttcattgtcttgcacccagtatcatcaactggagtggaatggctagataagtcgcaaaagatgctgggtggtaatttgtttttgaacttgcataggttcaaataccataatatgttgatgggaacatttctggggaaacttagacatgtataatatcttacgagttgtgcagtactcaccctgcgtggtaggtcaacgggaattcagagtagggaaggaagatattactgagctgttgagctacattctgaaggacactaaaactgcttggttgaaataaagtagtgttaggaagtaattttcacgtggctttctatagactttctcatacttcgctgtttttgctggactttgaaaaacatcagaaaatggtgttaaattggagaaatattagaaataattgaatgtatgattaaagtgacaccaaggaaattcttaaagctaccagtggactggaaaatcaagcttgttgaatattttagtggatgttagcagtatcagaaaaaggatagtgtctctgagtagagaaattgttaaaagaggtgcaataggtaaaacaatactgtcaatccattatatgaaagaaaataggataaagagactcttgactggtgtggagaataatagaaatacagttacacaccacataacaatgttttggtgaacagtggatcacatatatgacagtggtttcagaagattatattactgtatttttactgtacctgttctgtctagatatgtttagataccgaaatacttaccatcatgttacagttgcctacagtattcaatacagtcatatagttttacagatttgtagcctaggagcagtaggctataccacatagccaaggtgtatagcaggctatagcatctaggtttatgtaagtacactctgatgtctcagcaacaatgaaatcgcctaacagtgcacttctcagaacatatccctgttgttaagtgacacttgactgtctagatttgaaagttgcttgagagatggccgagtggccatgttttttaaataaggaagttgagaaacagggatatcaagtgcttggtacagttttgttcattgtattgttttggttgtaaactatctaatctatcccaatctagctgaagaaaaatgcgagaatttagtgactaacataactgcaaagtccagaggtatcattggtttctagccataaagacaaggtatcaggaatctgtttttctagtgagctcttgttttcctggatgaccttcattcccaagcaagctgtcttcttggggttacataaaacagctccatcctacatccctctaggttcagattcaatggaaaagagaatacctttctaaatatttccggaaagttctctattaatactccgactttgtttaaatggatcacatttccatccctgtactccaaggttctataggaagcttttcttctaagggaaggaaaagaattgttatccaaaggaaatcagaagttggttactaagtggcggtcaagtcaacaggtgtctcttacagagtacagaaagccactttcgggcataagtgaggcatgtctccaggtttcctggtctacctcatcaggctgccattcttcccactgggaccattaatccaacaaatatttattgagtgtcatccatgagcaaaatatagaaagtaataagagtctcactgtcaaattgatttcaatttggattgctctggttactaatttcaaagtcagttgctatgagcatcatttggcacaactgccctggaacactggatcagcatttctggcatgggaacccagaaatctgctctttcagcaagcctcccagtgacatgattgtgcagcaaggttgaggagctactgtgcaagaaaagagtgctttgaacatgtgtaaatgtctttataaaagccatttgcagcttatttctatcgtagttggagtttctcaaagcttaggaggcatgaagtacctaatttggaataattatattaaattcagattccagggccccccttgagacctattcaaatttctaatcttgttcctaggaatccacattttctttaatctacccaggtgaattctgatacgtgataaaattattctccaaagtggaatataaaatgttgaaccatggtggctcagagaaaggttttagaatactagttttatgttttgtcaattaaaagaaagctgtgttaatatttgatgtatatgttgcagccggcgccctcatgtggtctgtgtgccaggtggttacatgtcttatttggcaggtattcaatggaaagaatgggaataccagtgtacacagaaattcaattgctttcaacatattgcaatcaactgcattttatatatgcctattgtaagtaaatctgtgtgttaatatacctttgtaaccaaaccacctctcccagaatagacaaatggcttaatcaacatggtctctgtcacccatcttctgagtaaaaaaaggatctaatcagatctgacatggagctgggcatggaaattataaattattaggacagtttggtctatgcttttttgatatatgcttttatatatgtcttctctcattaaccataagtctcatctgcaatatattttgtgaattatttccaaatgttaaagattagcacgatactttaaaatgatgtttctttcattttcaccgcatcactttttttcttcttttgtgattgttttaggatgaatatattgtgttagtacagtaatccaggtgtgtagtttatcggtaaataaaatagtgggaacttacccacctacacagaacttgtaccagttgggtagtacatgatctaaagaaatgcagtgaccactgttctgtcaaggccaggcatagcggctgatgcctgtaatcccagtgctttgggaagccaaggcaggaggatcaggaggccaggaattcgaaaccagcctgggcaagatagctgagattgcatctctacaaaaaaatttaaaatgtaaccaggcatggtggcatacacctgtggtcccagctacttgggaggctgagtcaggaagatcacctgagcctgggagttccaggctgcagtgagctgtgattgtaccactgcactccagcctgggtgacagtgagaacctgtctcttaaaaaaaaaagaaagaaaagaaatggcctgtctttggaactctcttgctcacattctggtacatttggttagcctttcatttccttgttacttgactttaaaaagacaaaagagaagaagaaaaaataaactgccatttattgttagatttcaaccataaggaaaacaccttatctgtatttatttacatgttgataattgccttctttctgtttgtcagatacatatgcatatcgctttgttgatagaaaagacggagatacccagaatagccaggaagcacagcccacaccacgcattaatttttaaaccatttcttagatcacagagtctcttgaatccattcgcttttccagtttcaatagtgtttgacaaaaggaatgtgttagtgtgcattcctctggctttgattttttttttcctaaggatacatcaaactcttgacagatatatgagtgtcattttttgtggtttaatatagactgtatttatatttataaatgtaattgctctccaaaggaaatcagtaatttgttagtgattatctgtattttgaacttcactgccttgggtttttttttttttttttggagacggagtctctttctgtctcccaggctggagtgcagtggtgctatctcagctcactgcaacctccacctcccaggctcaagtgattctcctgcctcagcctcccgagtagctgggattacaggcgtccgccatcacacctggctaatttttgtatttttagtagagacggggtttctccatgttggccaggctggtcttcatctcctgacctcagataatccacccacctcggcctcccaaagttgtgggattacaggcatgagccatcatgcctggccttccttttaataaatttgaaacttatctagctagtgcttaatattctgaagggatgaatttgtttgctgtaagaaagataagcatggcatctgcttcacacctgtggtgttggggataaagagcatgcagtaagttatattgagggacctttgcaggatcttcaggggatggcctctgttctgggattttttctcatctaaatgtaaactaaaatatagatttcctctccccatgagagcatttagagttacgaggctcaaactgctggttagataatttgacttcctagctctgccaagcccagctgttcatgcagtgcaaaattttttaaactttctattgaggtatagcctacatacggtgaaatgttcaaatatgaagggtactacatgagggactatacatgtgtatacaccctgtaactactgtctgggtcaagatatggaacatgcccatcactctgaaaggcttcctagtggaccttctcggtcttaaccttaccctcactgcacatctatgagcgtactgacttccatcctcttctgtccctttttgtctatttgtgaccaacaatgattgctgctgctattgtagtcccaattgttagactcagagtcattcttgggactctcacaggacaattctaacatttctatagctccaataggaggacaaggcctgtctgccttcagactctcctggtaggcctgaagtaatatacaaggtattcattatttgttagctactgttttgaataatgggtttctttcttctatttggccttctctccagttggtctttaatgtgtacgtcacctgtttggaataactggttatgttagtgtctatagatccatttgtaaggatcaatttgtctgagtagcttgctgttttctaacactggttggggcctccagggatagaaacgtgggccaggtgatttgatagagagggaaataatcaggaaagtcagtggttcttctgggtgtcacctgacttcacctggttgccagagcagactgtaaggaacaagaggcaagttagcaatagaggttgaggcagctgcctaatcatgtgtctctttgggacatttgaattcttccaggtatttggaaatggaagcagaaatggaaatctttgtttttgtaccttttttgagttatattttgcagtcttaaaagaactgcattgttccttcatttatgaagcgtacgggagtatgtgacagggaattcaaagatgtggttttgcattatacagtgcttacgtgagaggcatgtattttgctgaataagttcatggacgaggtataaagatgaaattataggctttagtgggagcaaaaagtagacaccacttccatgtttccatggggaaatgggtcaggggagcgattgctcattggaatcaggaaataattcatgtagcaggtagcacttaatttgaatcttgaaagatgatgagtaggagtttttcaggtagaattatatctcaagttttcctgcttctggttgttctgaactgatacactcacatcataaattgctattgtagttaatattgtaattaaggcccaattatgtttcaagtatcagtggaattgagtccacactttcattgcattgcaaaatttaaagcagtaattaatataggactattattataccattatactcattttaaagatgataccatacttagttttctatgttttggattaaaattgcaaaatgtgttaaaaaatgtaaaggcatcacagaaatatcgctaataaggcttaaatcattgaggctgggcatgctaatgagagaacagctactgtttgttgagcttgtaacacggactagtcactctgctttattttatcacaactgcttttcatagcaacctcaataactaggtgcttgttagatctaatcctgtttttcagatacagaaaacggagacataggtgaagttccctgtatttatttcctagggttgccttgacaaattatcacaagctaagtagcttagaacagcagatatttgttgtcttacagttctggaggctccacatctgagatcaagatgtctgtagggttggttccttctgagggctgtgggagagaatcgcttttgtgcttttgctcttagcttctggtggtttgcaggcagtctttgacatttcttggctttgtagatgcatcacttgccttcatctttgtgtggcattctccttgtctttctctgtgtccacatttccctaatttttaaagaacatagtcatattggattgggattcattctaatggcctcatctcaatttgatcatctgcaaagaccctgtttataaattttccaaataaggtgacagtcataggtatacagaggataaggacttcaaaatcttttgggaagatataattcaaaccataacattgcccaagctcactcagctagtaagcagtagagagaattcaaatccaagtacatatgactctatagcccaaggctctaacaactgtgccattatacattagggaaatacattcgtatccaagaatattgtacgttttaaaattcagcagtgagtaggcaaatatcaggatatgaacatcccatccagacaggattgacttcgaatatgccctggtaagaagtgttagtccagttgtcatggaattgtagatgtttgctgtccactgagatatgtgttatgtgcttcgttctgtacaaagggtataggagtgatattctatttagtctaaatcaagcttgtccaacctgtgacccacggaccacatgtagcccatgagggctttgaatgtggcccaacacaaatttgtaaactttcttaataccttataagatttttttttttaagcacatcattagtgttagtgtattttatggtagcccaagacaattcttcttccattgtggcctagggaagccaaaagattggacacccctggtctaaatacaaaacattgtatctcaacctcagcattttgggcttaataagcctttgttatgtcatgtgcattgtaggatgtaaaatagtattcttggcctaaaatatctaagatgtaatagatgccagtggcacccctgacacagttgtgacaaccaaaaatgttcccagacattaccaaatgtcccctggggtaattacgattactgcagtttgagaaccactggtttagaaagagaggaatgacatgtggctaaactgtgccaccctgtcacttgctgtgctttgcctagactttgtgtctatttagggtggttgctggcaaagtgtgaggaagacaaactgtttctgttgaacttcccttgaggctctatgtcattcatggacacgagaaggaggtccacagatggaatggagagttgaagactgaaagcgcattatgcatgctgtctgcataacttgacttttacaaagcgagatagtggctttggaataaacgggagataaaagtaaagctctttcatctaaacaacaaggattatccatgtttccagagaaaggcaaatgactctgatggcagactgaaagtcaatgttttgacttaactattttgggaggtatttgcaattgagatcagagttttaatgggccttacctgagaaggaaaggcagggatggttaaccctggctacacctttgggtttttaaccctggtgtttatggtgagaaaccacagccaatctcagccaaccattgaacattgtctggaaattctgacttaagacttacccacatccatccttcatcctccagtttacactgttttctgttgtccaggaagatggagaagtacctctttttttatttcaaaagaagtgcttttctgtaggctgccttgtgggactcccaaaggatgccatttcctgagacacgtcaaggtatctgcatcttagacagtggtgttaccatgtccgcacatcagtcagtgcattttctcttggccccaggccagtaatgtggttgtgtacactggtcacagctcaaaaaactgaaaaatgaactctgagctttactgcaaagaatgccagctaacaaaaataactctgccagagcagtgccctggacaggtttgcagctctgagatctaacagtgctgatgtatgggagtccagtagaatgcttaaaaagaaaggaaaaaatagaaaaaatccatctgctgtgccgttaacattccaaaaaggtaatgcccaagaactccaaatgggtcctaatgtgctgtttaagactcagaaaactcagctttaagttctacaccactctgtgctcccagactgggaacaaaaacagggtatttccgtgaagtgcaaatagatgattgtatggaggaatcagtgggtaggaattattttgctagcatgttaaaaatacttcaggtgtaggcatttcaagaaataataaagcccaatactctaacccttagaccagaacttggggctacagatggaatacaatgctttgaataaaactataacccctaccagagacctctttgaaaacacagcagtgctagtatggatgtgcttcccctagcatgcaattccccatggatccagccttattgcgtttctctgtacaattcagaaagcaggacggaaaattgtgtgtacctagcccaagctatctttattgtctgatgtctaatacaacctcattcctaacctcaccttaataatcttataagggagcataagttgccttacggtgggaaggaaccttgctagtgtgatgacatttggatatgcacttatttattattattattattttttttagagactgggttttgctatgtcaaccagggttgtctgaaacgcctaacctcaagtgatcttcccacctcagtctctgaaagtgttgggattacatgagccactgcacccagctggatgttcattttaagtgcgtcagtccttttatgctaaagcttgtcatccccctccccctcatacacacctttttgttgggatctacagaaagtcacctatggatactgccaagcttcattcttgccctgcgtttatggatctggggagtttatgtcctgagtatgtaggccgtgggtctgtcccgggaagcagtgcatgtgtaggtgctgttgttagcatgacccaagtaggcagtagggaccaggttgaattcagtgttgataacagcatccagcagataggactaggcttaaattctgaccaaggcagttgttgagtcaaactaggtccaagaagaaagaaaacagagccccagtgatctgaacccactgaagttgagctctactcccaagggaagggctcttttcttccctaaactgcattatgatccctgctgtgtctttccctttgcttatgagcaattgtcacaccagaaggagatggggactctaccacagaactctgctcttggtaggcagacgggaatgatcatccagtgtctggcctgatgaagcatcagccccaggtatccggtctgctctgaaggggcacagattgtagagtcactggatccctaactgttcaccagctatgttcttgaagcagtttcttaaccttcctaaaattccctttcccagtctttaaaatggggataatagtaacacccgctatgtagaattgtcatgaagataaaatttcctaatcttcacgaagcacatgtcctaggggactccttcataagtggaactcacaaaattatagatgattcttagacttggactctctcaaattctggttcctcattccattcccctactagcagtcagcttgaaaacagctctaaagcttgccctctgaagactctgatctcattaccccaaacccctattgtccataaaacagatcaggaatgagaattcagcttttgatcttaccttgtaagaaatatggaccgagacctggtatgaaagacatttgttttaaagcgtcatagaatctcatgtttagaatgagcttaaaaaccaactgctgttgaaagtcaggagttggctgggcacagtggctcacgcctataatcccagctctctgggaggcccaggcagacagattgcatgagcccaggagttcaagaccggcctgagaaacacggcaaaccccatgatatggtttggctgtatccccacccaaatctcatcttgaattatagtttccataatcctcacatgtcatgggaggaacctagtaggaggtagtggaattatgggggccgttactcccatgctgctgttctcatgatagtgagtgagttctcacgagatctgatggtttcataaggggcttttccgacttttgtttggcacttcttgctgctgccatgtgaagaaggacgtgtttgcttccccctccaccatgattgtaagtttcctgaggcctccccagctgtactgaactgtgagtcaattaaacctctttcctttataaattaccagtcttggatatgtctttattagcagcatgaagacagattaatacacaccatctctacaaaaaaatacaaaaattagctgggcatgatggcacaagcctgtagccccagctattccccaggcaggaggatcgtttgagcccaggaggtcgaggctgcagtgagccatggtcacaccaccgcactctagcctgagcaacagagtgagaccctgtctcaaaaaaaaaaaaaaaaaaaaatccttcctgctgatttcctgtatcttgatgagaatgagttgcacctttagtggctgtagcctaagaaggaaactgaagaactgcagatcagggactatcatttaatggctactggctactgttacacttcctgcaagcagtaataggtaaatagaaagtcagtagatggttactcttggttggagggtagtgaccagatgagattgcacaaggcttctggaggagcaagaagcgttctctttcctcatcaggatgccagttacgtggatgtgctcactctgagacttcattgagatcactcacagttgcacttacagctatgcactgttctgtctgtatgtcagtatttagtaaagtttgaaaagaaatcttgtcatcctgtgctatgtggttcttgttttagtctttctttgttgttgttgtcttgtatttcttgtttcaaatatttacaaaagaaattctccttgataaatctttaaacaatactgaaggtatggagtagaaattgaagtcattgttttatctctattcttgcctgcattttcagttctcagaggtaaccgaagttaaatatcttatagattgtttaaggttttctgccctcctttatctgaaatatgggatgatcataatacatggagttctgtaacttgccttatcattggctttttttgcatatcagatacagaatcaacatagttctttttaatacctgcataatatttcatagtatggatgcatcctaatttatcttgttattctcctaaattgtcaatgaacgtgtctgtatccttctgctattataaataatgcttcttgaactccctgaatctcccttgtaacatttgtgacactggtcaaatcccaactaaggtagcctgttttagcatcccttgatttaaaataccttctttgaaattaagcttttgtcctggagtttttaatgggcacaactctctatgatgactgaaatctgaaatttgggaattacaaaccagacttcctgggcagacttctgagtgtgttcactgttgtgtattataaattcaagacaaattagaaaaacaaatgtttgagcaggactgtatttaaggtatcgtatctctggatgttttctatatccactaacaagataggtcatgaatggagccactctgtaacctgattattggttgacaccatctccggtagacttttgtcttcatgaagtcatggttttgatattttgctgtttttatcccctcctttaaactctatttttattccaaattactaacttccctgctgagatttatctatcagagtctcaagatgctctcattaataaagttattaacccctttgctaactagcagcatccaaagcctaaaaaacattacttggctttctcttttcttttctttttttttttttttagatggagtctcgctctgtcgcccaggccggagtgtagtggtgccatctcagctcactgcaatctctgcctcctgggtttcagcgattctcctgcctcagcctcctgggtagctgggattataggcgcccgccaccacaccccagttaatttttgtatttttagtagagacggggtttcaccacgttggccaggctggtctggaactcatgacgtcgggtgatctgcctacttcggcctcccaaagtgttaggattacaggcgtgagccactgcgcccagctgcctggctttctcttgatgccaaggttgctgcttttacaatggctggctgttggagagtggcatttttcgttacaatttagtatgggggggcgggcgtggtggctcacgcctgtaatcccagcactttgggaggccgaggcaggtggatcacctgaggttgggagttcgagaccagcctgaccaacatggagaaaccccatctctactaaaaatataaaattagctgggcgtggtggcgcgtgcctgtaatcccagctactcaggaggctgaggcaggagaatatcttgaacctgggaggtggaggttgctgtgagccgagattgtgccattgcactccatcctgggcaacaaaagcgaaactccatctcaaaaatttagtatgggattaaatgaatggatagcaggatgaactgttgtttgataaagcaggtacatttaaatgttaagggaggtatctaggtgggttgtatacaggtgttcacagcaaaattctttcagctttgctcgtatgcttaatgcttttagttaataaaatgttggggggaaagcatatgaaacaataagaaaatgggaaaatctaattaatgagggacttgatctgagtcatatgtaaatgaattccctatcaagtaaccagttcaacagagacatctattttttgaaaagaagttttgtagaaattacaattatactaatgatgagtaagaagataatgttgatctcatctcatagattttatggcattgttttttttaaaggcaggatctcattgtgttacttaggctggtgggcaatcatggctcactgcagcctgacctccttctgggctcaagtgattgctctacttcagcctcccaagtagcatggaccacaggcatgtgccaccatgcccagttaatttttgtagaaataaggtttcaccatgttgcttaggctgttttcaaactcctgaactcaagctatctgcccgtctcagcctcccagagtgctgggattacaggcatgagccaccatgcccagccaattttgtggcattcttacttgccctgtggtgttaaatactaaccccaaactagtgtaaggttatattcaatcatcaaactttgttttaagtcatcatcattcaaatgtatgtaaaagcatcatctcaattttgcatatttggaaatggggacccagaataattaaatgatttacccctgatcttagcacccgatgaggcagagcttgaacttgaactttcattttctaattattatcttttccactccatcatatgttttctctgattatgagattctgaaatccacattttccagagaattgatagaaagatcatcaagccaaggattttgaactatgatcaaagctacaatggtggcagcccactgttctttttaccactaaagcctttatccagttcagaaaatgcctctctctaatcattcctgttgggttttaaccaatatatcaggaagacgtgctttgctgagctttgggcagccttgttttgctctctgattctctggtgtccttctgagcaaagatacggtctgagagagttaatattaatactttgtgtttatataaagtaaaattatagtgcacagtgtaattttatggctaggtaggtgggaaattattagtctaaataaatacactttttagtagagcagctgtgttaagtaaattaaattctgcataaatctgaaacagtacctcgattttcatttttatttatttatattttttgtagagaactagtatcgctatgttgcccaggctagtcttgaactgctggcttcgagcaatcctcctgcctcatcctcccaaaatgctgggattctaggtgtgagtcacctcacctggcctcaatcttttctttatttctttgtttcctttggagtgttagtgagcttgagtagttgtgcgtttcattgtggtaaaagatacatgaagagtgaattgtgttacagtgagatcaggaataaaggaagattacaccctgcgtgatgtggagctgtctgttgctaggggctgatggatgcattcctttagaacactttgctgatgaggctggtcttctgagttaggtccctaaatggatctattagattcaccctcttcttcttacagcagtggtggggtttgggttttgttcttttttggtttttctttttctgctcatttcaagggagactttttttccgatgagctacatttttagagccagcaagtgttttaaacagttgggataaaccacctttcttggccccaaatgaatacaagtcttctccccagagaaaactactgttagtttgtgctgtttttccagacgtgagccttcccttgccttagatctatatacttgggcatatacccacaggacacaaactatactgagttgtatgacatttttaaagtcaaatgtgatcacagtgtatttattttgcaagttgattttctcctctaacaatatatctgagaactttcaaggttggtcttgaactcctggtctgaagcaatcctcctgcttcagtctcccaaattagtgcctaatttcttccttcccctccgtaggttctaccattctcctatttattatgcatatcaagtttttcttcccctgatgccatcgatggtggggcatagatacttgaatatttgtctttgtatatgcagcacttgtggcaaagtattaatattgtgaataaagagctccttaaataataaaacaggaaatcattagaaaaaactaagtaaagattctttacttactggttatttggattttttttttttttttttttttttttttgaggcggagtttcactgttcttgcccagcctggagtataatggtgcaatctgggctcgccgcaacatccagctccctggttcaagtgattctcctgcctcggcctcccgagtagcgtgattacaggcgcgtgccaccacgccaagctaattttttgtattttttagtaaagatgggctttcaccatgttagccaggatggccttgatttcctgacctcctgatcctcccagctcggcttcccaaagtgctgagattataggtgtgagccactgcacccagccttgtttggaaatttttaaatgagagcagaagtacccatccaatggtaaaaaataagaaggatccataaatccagtgttacgaatggtataggaaaattggtattctcctgcactgttgattagagtaaaaaaatgtgtgtaatcttttcaggggatggtttggcttgaactgcttctagatatctgtcttagaggagggattttttgctcactgaggcatgtttacatatttttttagaggtagtgatttttaacctttctagcttgtggagcccttgaagattccagggaagtccatggttgtgtaccgcatgagaccagggctgaaaatgggtctttcagcacatggttgtagatggaaccatagaaatctgtctgatcaatgaactgttgaagtgatggacactgttcagtgaatacatgtaccacctttggcagtctttcagggggcttgcagccctgctggaagccagattcatagttccataaatttgtttttcccccttgatcagtcatctgaccaatgctgttggttattttaagggatactgaataataataataataaaaaatcccggtggagcaatgcaacgtattttctcctgtgtgggaaataactcattcattcattccatagtcatttaatgagtgcctaccatgtgcttagctttgtaaggaccctcccagtgggagaggtcatgatacaacatccagaagaaccttttgtaaggggatctccaccagaaatgataagatgacctcaggaacagaagagctcttttaaagaacagatgttctagaccagttgacccagctaaccttaaaaatacttcactgtagaggttctcccaaggacactaaagggtgtggtttggatttatagaactcagaagcgtttggaagcctttagttgttttggatgtgtgttctcagaaatgttttgcagcaacctttttcttatggagaaccatgatgtggtagcattcagctgtatagtgcaaaatgtagttttccagataaaagagcataacttgtctttgtgacaagctttcttggaggtctctggctgggagaagaggagggaatacaaccaactagatctacacctgtgttaattttgcttagcttaattgcaaattcatgacgtcatcatttccccgaaaacatgacgaggtggaaaatacaatatcagaaatgaggaaagaactctaatggtaactttggttgagaaagtaacaaactatatttcaggtttcttgtatttcaaaatgggagacatattgctgattcctagttggttttgaatgatttataaccttttatttgtggctgagtgttgcagtctatgttgtcatggaaattctattgaatttataggtccatttatccaaaatgattttccagacttcatttcatggtgaatcatgtggctgttactcccaagtacaaagcaatttctaaaaagtttcatattacaaagagcacaaacactgtggtagtgatttttgtgtttttgaaatacaaatgagttccagatgcacctaggggcccctccccctccactgtgtccaaggcgttaagctccactgcatttcagaaccagctttatacatagaatagccatgcaagcaaggaaacgttgtttcattagaaaagaaagccattgcagtcacctcaagagaagttgaaattactggtttatgtgtatggacaaaagtgctctcctggctgggcgcggtggctcatgcctgtaatcccagcactttgggaggccgaggtgggcggatcatgaggtcaggagatctagaccatcctgctcaacatggtgaaaccccctctctgctaaaattacaataattagctggatgtggtggcacgtgcctgtaatcccagctactcaggaggcggaggcaggagaatcacctggactcaggaggaggaggttgcagtgagccgagatcacgccactgcactccagcttggcgacaaagtgagagattctgactcaaaaaaaaaaaaaaaaaaaaaaatcaactgctctcccagtttcaagctccctcacagcagacttgatcctccccctcaaggttcagtagtggtgtgaaagggaaagaaaaacaaagggctttaccatgcccactgataatgtttcatgttgacagggggtgtaggacagggtttctgcatctcagcactatggacattctgggtggataattcttttcttttttttttttttcttttgtcaacctccaaagcgtgagtaggcacaggaaactcccatgatgtggggcactattctttgcattttggggtgtttaggagcacccctggcctctacctgctagatcagtggtccccaacctttttggcacgagggaccggttttggggaagacaatttttccacggaccttgtccatggtggcgatggtttcaggatgagtcacttgcattgtatttattgtgcactttatttctattattattacattgtaatatataatgaaataattttacaatgtataattgtataatgtagaatcagtgggagccctgagcgtgttttcttgcaagtagatggtcccatctagggatgatgggagacagcgacagatcatcaggcattagattctcattaggagcgtgcaacctggattccttgcatgcgcagttcataatagggtttacgctcctgtgagaatctaatggcatcctgatctgacaggaggcagagctcagtcaataatgtgagctatgaggagcagctgtaaatacagatgagggggttagggacctctgtgctagatgcctatcaccccctcaaagagtgacaaccaaaaatgtctctagacatggccatatttccactggggtacagaatcaccccatgttaagaacactgctctggaagctttgtactaggaccctagagagaactaacaggtagtgctcattgctaatggaattctggtgaggatgttgtgtggtagaacagttttaagtaagtgggctctacaagcaaatgcctagatttgagtcccagtgttaattacttcttagataagacctactatctcagccttaatttccttctgtataaaataggaaaaataagagtatcacttctagaaaatagtagtattgatttaaggaattaattgatgtaaaacgttcagaatcgggcacatttaaacaaccctcctgagtgctttatgcttgaggctgcctcaggggaaagggtaggcaggggcagtgcctggctcttgtaatagttattgggccctaggctggagggattctctatgttaaggccagtcactggaacttgctccgtcaagcaggtaagttcaatctgaccatactgtcagatttaaagtagcttatattaaatggaatgaatgcaaaacagggcagtaaactcggccctactctgttttggtttgtttgtttgtttttaattgaagcagagtctcactgtgtcacccaggttggagtgcagtgatgcaatcacagctcactgcagccttgaactcctgggctcaagtgatcctcctgcctcagcctcctgagtagctagaactactggtctatgctatcatgcccagctagtgtttttgttttgttttggtttggtttggttttttgagataaggtctccctatgtttctcaggctggtctcaaactccttggctccaggagatctcaaaaacatcctggcacccaagtatatgcctcatagccctagtgtgcaccttaggttctactgccccaaaacttgggattcctgccgtaaagtagttgaagataattccctgttacagggcaaatgaaaacaggaaataattaaggattagtgtactctgtgattaatgatattgcataaaggaagtgtttgagaatgtttatttaaatgccaccttgcctgcaaagatacccgctacctactattcttcagagcttggttcctctaaaaatattcttccagtgaatgccacacactggtttctttgccacaccctgtggcatgacttcttgggatgttggctagcctgtggaaatggtttatttgaaccttactttaagtatcccttctggtcatgaagaaagtcatcaggacatattgtaagagaaaaatgagagctgtttcatcagtttttacttctccaaagcaagcgcttagcgaaaatgtattacaacagccccttgaggtgtgagtattacctctatttcacagaaggggacactgggccttagaaatctccaggctcttcaatatacaaatccggtcttattctatagcaaatactcttagatcttcatctaatactgccaactttatggatatttttctgtaagctgtaagagtgtgaactgggctgtaacaggggctacattctccaaggtagaagcctgttagaaagaagtgagagaagatgatagagttcagagctcaaagaagctcaaaaagtaacggagttgcaaaatggttttataatgtgatacacagacagacatacctgtgtatgtttgcttaaaaccggtaatgattttagggggtgtattagtcagggttctccagagaaagagagccataggatcgatgtctctctctctctctctctctctctctctctctctctctctctctctcacacacagacacacgcacacacacacacacatgcacgcacagagtaactccggcctataattcatgaattttagctaagttactctagctaagttgatcttgcagtcttgagttcaaaggctggaaacctgagctcaatctgtgttgcagtgtagaggcagaattccctcctcttaaaaagacctcaggtcttcagctgattgcatgagacccacccacattatagagggtaatcagctttacttctaaagtctactgatttaaatgttaatcacatgtaaaaaatactttcacaaaaaataacaatgatccttttaaaaagtaactaggaataaaaactttgttcaataggataaaacaaaatacccagagtgtttgtgttatgtattttaatgtaatatgtataatgtatatttatcatttttctccataatttaaatgaatagatcttcttttgttgaagtattaaaattttaggccagagttacttagacaatggtttgactttcttgtgaattaaagagaaagtaacataatctgtatttagcagaaccatacctggagtcacttggccatttcacagtgattttggcttgtatttgcacctttctgagcatttactccagcagtttaaattccttcattctttcaatatcttgagccctccttgccactgattttgttatttattccaagagatggcatggattttgttagtgtttatggctttatcacttggctgtccttgcttcaagccacttagagctcccactcattttattcattccagaaataaattactagtatttacaatgggcagcactgtgctagggacacagccttgcactgcacagacttacgtcctgcgtgcatacatctttctgtctacaggcaatggcagaattagagttagagtgtagtgtgttgagtgtgtgcgtcctggcctccttaatactagccgttacaaaataatttaaaaatcatgttagattaggagcttattttacaaaatgcttaactctgtcatcatcctacgcatgtcatcaaaaaagcagaactggcagattcactgtgtttggatgtttactttgccttcacttcacatctttattcttaggcacctgtttcttgtccaccaccacgttcccactggcaggttaacaccaagcttgattagaaaaatacgtttcccaggtttgtcaaagtaacctgcacaatgtgcacatgtaccctaaaacttaaagtataattaaaaaaaaaaagaaaaaaaaagaaaaatacatttccacctcctcagttctgttgtctgctgcctcctatgtgatttttaattctgctgttgcctttttggttaccctctttatctcgtcctgtttacgtctcatctccatctgttcttttctgtagcttttgcctgtgtgttcttccactttaataaaaatccccagcagtatcctggaaatgtctattgagtcgttcagtagattgccttccccctgagctatctgcatgctgtttccttacttactccgtcatgattttttttcttggaccatgtgtggggggcacgtgggagaaatcgctttttgagaggaaataaaacgtagagctttctaaatctgcatataaattactgttgggttttctactctcatgttgggatcatttccttttgcttccatgatcacagcaaccagggagctgacttaggcacacaactataatagtaggcacacaacacaccttctgggaaatgccccctcctgcccattgcctgtataaatgtagtatttgtttaatagatgcctcacttgaccatgagccactcattgccttatgcttttatttcgtgatacactcagtcagctttggcactcaaaaataaagttaaccttgtctcattaatgatattttagtcttcctaagtgcagactgtatcttcatctgtcatggtgccttacagacaataggcattaagcaatactcctgccaattggaaggaagcacagtgattaagatcttgaactctgagatttgaaagacaattttgaaatataatttttctgtcccaaccccactttccttccttaggagctttgtaaatttcaaattacaaattttgtaaatccttagtttccttgcctataaaatgagaatcgtacggatacctatctcactgagtgccaatgaatcatagtacagtacctagcatacagtaggtacttactaaaggtttgaaaaacattaacaatgttttaatatgattaaaagtatcaaaggctcaggttttcagatttgttgctttctattcattcaacttaacatggacagtgacacatgtaggaaaccagacatatacacatttgtaaagtcaaactacaactggaattattttaaatgtaagggagaagttgcacaaggcaggaggaaagggaagctaggtggacattttgttgtcactttgtatgtatcacactagtaccttacaacagtggagcattgactgttgtcaaccctgtactcacagtgtccttttcacctccctcccattacttgacagtattgggattcatgcaggcatttgccatatatgtattttaggacatgtttcctggtcgatgatgatgcttttaatgtgagttgttttgcccctgtaaaattccattttccaaatgtcaaattatgctatatgatactctatgttatccatcaccttgatctggctagaaaaacacctggagggttttgcagtcaagacattccacaaggcagagttgaatgatccatttgggctaatgactctcacttacgactttgaaaaatttggcagaactggtcccatgattgtgccctggtgcaagcagtctatcggtggctttttaattgagtttcatagagtttgtttctgtgcttgagaatatatatgtgtatgtgtgtgtgtgtgtgtgtgtgtgtgtgtgttttatgtatatcatatatagtatctgctatctcatggaactctacatgatgaaggaatgtctgtttatacaggattgattcaactttccttcccttgcaaaagagaggcctgcttggaataggttcatcgacctttaagctatatagttttcttaaagaatcaaacccaaagtattctatttcaactatgtttggaaaatactgagttaaagttactaagtcttcgaataacctttgaaccaggacttaaatggccaattctagggatagggcagggaaaatgtaggatgagcccaaaacatctgtgcttgataggagttgctaaaaaataaaaaaataggagaacgtggcagagtgacagggaaatagttttgaagggtctcctactgggcaaatgtgggacaatctgagcatcaaaatacataatgttagtaatggaatctgatatctgataatggattgaataaatagaaacaaaaataaacaagtccatatggatgtaaatgaatgaatgaataagtgaataaactgcagtgcagggaaagcaattccttactctagaatgccagtaatgaatatagaaggaatggtggagttagaaagtcacccaaggatactaaagtagtgagtcaacattaaatgaggagcaggatatttatctcatgccaaagtatctctctacaaaatactttttaattatgaaaggaaaattaataacattatagtggagaagcccaatagatagcaccttagccacatgatcaagataaatacctccaatagcgggataaacccgcataaatgtgcttgctgatatgatgcacggagaagatataaattttttttttttgagactgagtctcactctgttgccgaggctggagtgcagtggcgcaatctcggctcaccacaacctccgtctcccaggttcaagtgattctcctgcctcagcctcccaagtagcctcccaagtggcaggcacctgccaccgcacctggctaatttttgtatttttgtagagacagggtttcaccatgttggccaggctggtctcaaactcctgacctcaagtgatccatccaccttggcctcacaaagtgctgggattacaggtgtaagccaccacacccagctgacaaacctcaattctatgaaatttctgccctgtacgcttccaactgtcagagtaaagaaagaggctcagtaactgttccggatgaagatggggttggaagaggtcagtgtaaaaagacaggacaactaaatacaaagtttgatcctagattgagttctggactgagaaccagaaaatgatctgtaatggactttatttgggcacttgccaaaacttgaaaatggtctgtgaattagataatagtattgtgttaatgtgaagtttggtaattctaataattattctgtgattatgtaagagaatgtccttattcttagaaattactcacttgagtatttagtggtaaaggggcctattatctcccatttgctcccagatgattgaggaaaaaaagtgagagtgtgtgtgtgtgtgtgtgtgtgtgtgtgtgtatacagagagagcgcaaaagaggtatagtataaataattggtgatactgggtaaaggagatagggaacagttaatagatccctttattgctggattttccagatctttttttctttttttcctttcttttcttttctttctttttttttttttttttttttgagacaggatcttgctctgtcactcaggctggagtgcagtggagccctcagtagcctcaatagcctcaacctcctgggctcgagcaatcctctcacctcagtctcctgaataggtgggactacactcaccactcctggctaattttttgtagagatgaggtctcactgtgttgcccaggctggcctcaaactcctgttctcaaccagtcctcccacttggacctcccatagtgctggggttacatgcatgagccacattgcacctggccccagatcttttcttcagcttacgtacaccacgtttcttcatagaaggattgctgtagagtgagcatcacttagattaacattactagaaagaacagactttggggaatattgaacggagggctctgggatctagagcccagaatgttgaagggagggctctgggcacagttcattttgaggataaaattgatggtagctaccccaaacacctgccaaaggtgtttttggaaaatagtttccagcctctgtccaaacttggacatcaccaccgctgacaaagtatgtttcaattcacgcatgtccaattcactcagcaaaacctcatctacttattcttacattttagacacttcaaatattaccgtaatttgttaggctacaacttgagaaaaatagtaagaaaaatagatatttcagacctgtgctactgtcctttttatgagacattttattatccagatgggtggagctgtgacccaaacacattttctaaaaatgtatttttttacccacttgtaaatgaaaatgcccttgaagaggtcttaaagtattttgtatcacacgctattcgggtgatgcattaaacaatgctgctcctgcacatgggctgaagtataagaaagccttctgtgaacctacttaatttgagggcctgagttttaaaaagaaagtgaagtgtaattttctgaatacacctgtgttaagtttctttcttgggttagtagtattgtatccaaagcaattcacctaatattaaaccattctaatctgtaccttattgaatggatttttctctaaaaattcatgatgtctaaagctgtccaaaccgtaaggcaacacatttgtaagaaactgccagaattggtgcaaatttacagtcttaggaaaaagaattacctttaagaaagaaaactctccaaaagaaaactacccatccttctcccatgtacttaggtatcagaattttcctaggaagtgtcctgatttgggctacctgattgccctcttcacagaagaaatgccgttgtattcttagcatttgagttaattcagtcatcagaactctgtttacctttgacctatatttagcttttccttctgggactttattgttcaccgtcaaatctctaaatctctctggggtgtggttgttcagtctattacagaaaatagcatcacgccttttggaaaagtagggaaatagaggtcatgaaagaactaattatatagaagatactgttttctgtaaggagtaccatcattctagatggttcagtggaatcacactcttactagaaatgttaagatgtttgccaaatgttaatcttaaaatatgatgatgatgatgatgaccaggcgcagtggttcgtgcatgtaatctcaacacgttgggaggccagggtgggcggattgcttgagctcagttactctaaaccagcctgggcaacatagtgagacgctgcctctaaaaatgtatatatatatgtataaaaactagcccgatatggtggtgtatacccgtagtcccagctgcttaggaggctgaggtgggaggatcgcttgagtccaggaggtcaaggccgcagtgagccatgatcatgccattgcactccagcctgggtgacaaaatgagaccctatcttagaaaaaaatacatatgtatatatggtgatgatgatggtgatttgttgagcatcgatgaggtctaaccatggtgcttcatgttatacactacgttaacttatttgagcctcacaattagcccagtaagtggaaatacttgactttatgcctaagaaagctggtgcttgcaagtaaggaagctggaataggaacccaggtctggttttttttgtttgtttgtttgtttgtttgtttgttttttaatcagtgtggaggcttctggggatacccaatggttcatttttgttctctacatcttttttttttttttcgagacagagttttgctcttgttgcccaggctggagtgcaatggcatgacctcggctcaccgcagcatccgcctcccaggttcaagtgattctcctgcctcagcctcccgagtagctgggattgcaggcatgcaccaccatgcctggctaattttgtattttttgtaggaacagggtttctccatgttggtcaggctggtctcgaactcccgacctcaggtgacctgcccgccacagcctcccaaagtgctgggattacaggcgtgagccactgcatccaactgttctctgcatctttttaaatgtcaaaatgtgtgccagcattaaagttgtataatgattctgagttgacttacctgtgttctgctttttgaataagaaattctagtcaggcccagtggctcacacttgtaatcccagtgttttgggaggctgaggcatgcagactgcttgaggccaggagtttgaaaccagcctggacaacaaggcaaaaccctgtccttacagaaaatacacaaattagctgggtattgtggcatgcacctgtagtcccagctactcaggaggctgaggtgggaggatctactgagcctaggagatggaggccgcagtgagccgtggtggctgccactgcattccagcctcggccacagagtgagagtgagtttgtttgtttgtttaaaaaaaaaaaaaacaaaccataatgctagccaaatgtaagagaagatatttaaggttgggatgaaagcacatggattttggattctctctgatgtgtaatagtaggcaaattatcgtcaaatttctgaagcactattttctcatctatagctgagtatagtaatttctgccctaattttttttacagggcttgttaagaggattaagaaaaataatgtgtgggttagctttttgcaaaaaggtggttaactccattaaaattttgcttcttaatagggaaatttcaccatgacctggctattagaggactagaaggcattggttttacttattttgggtggcatgaatgcattgtagttatgtgaaaagatgggatatattctgacatatctaggggtaaaatgacatgatgtctgggtttgttctaaaatacgttagcaaagggccgggtgtggtggctcatgcctgtaatcccagcactttgggaggccaaagcaagcagatcactttaggtcaagagttcaagaccagcctggtcaacatggtgaaagcccatctctacaaaaatacaaaaattagcgggcatgatggcagttgcctgtaatcccagctattcggctgaggcaggagaatcgcttgaacctgggaggcggaggttgtagtgagctgagattgagtcactgcagtccagcgtgggcaacagagcgagaccttatctcaaaaaaaaaaaaaaaaaaagttagcaaaggaaaaatatgaacaggtgaataaatttggcaaaatcttattagcaactggggaatatacatttatggtactattctctcaactttttatttatgtttgaaaattttcctaatacatttttttaattgttcttacagatgcagattttcttttacaatccagatgactttgacagctttcaaaccgcaatttctgagaacagaataatcggagccatggccatattttttcaagtaagttaacagtggctgaagtacttcaaagaattctttgagtattttttttaatttgccgaattgttccatgtttaatgaatgcatctgttttctagttcacacctgtccaaatgaaagatatttcatattgtctaatgtgtgatttaaaatgtaaataagtatgtttagaaacataatgaaaatttttgcatgaattactctgattttattgctacttgactggtgcacagattgaagaacacatttatcatctaagttacttcgccgctgaagcattttgaacaggttccttcagcatattaagagactgatataaaaaaaaaggtgtttttttgagcaactttaaaatttgacattacttgcaagtaagttaataaatagcatccgtcacttttctaaagagaccccctctctttccctctcagaaatccccatagtaactaaagtttttgttgcaactatctctgtgttggtacatttatgaactcttatccttctgtcctctcttttaatatgattgtgttgatgaatgctcataactcagtgttgattctgcacctagaatcccagcattgcatcctgtgataaaataatgctgttcaggctttttaataagtcaaatcaaagtagtgttgatcagtgagtgccttgaccaacttgcctgtaggagaccttggtgctttttagtgtgtaaggtagtctgagtagtaggcatctgtggtttgtctttcaatcttaaagttgacctagcgactacataaaggtgttcatttcaccaatgagtctctgttggaaaatgaagtctttttgacaactaaaggaaagttaaagacataagagccttctccaacacgtctttgacatctgcctttttgagcaagtttgtcattgaggtggagccattcttgtttggagtatgttaatttcaccacccttttcaatgggtgacacatgagtgacagttttctcccttttaactacatttctcccttttctcaagggagataaaggctcaaatgagagatcagatgaaaatttgaaaagcttgatattctacctagaataagaacaatggttgccattggtgattatggcactggttttcaaacagtgggttctatcttactgttgagccatgaaattatttcagtaagttctgatcagcattttaaaaacagtgacgtaaaataatatagaataggaaataagtcagaaaatatccgtaaaatatagtaaaggtaaatgtatttatagaatttgtttatgcacagtaaagcatactgggtgtatgctgggtcatgatataatgtgtattgcttactgtgggtcgtggtcaagtattttggaagttgtctgtttatgctatgtattggtctaatttgcccattgttctccaacacatctctttttcctcattacttttcatgaacacaatagagcatagtgttttaagagcttattcactggagtcaagatacttgcttttgaattccatgatttctgcagtgtaatggtaatgtagttatttaaacttttcaatctcagtatccttatctgtgaagtagagagaacagctaatacatcatgtagattgcagtggtaattaaaggacttcctagtatggctcctggaacatagcggacacttggaaattcccaaatagtatgcatctatagccctccatgtttctgtgggatggagaccccatggtatacatattatctttttatgaacagaagtatgttctggacactgccctgttggcagatgacttgagttctgtctggaccccttcggttcattttttttttttttttttttgagatggagtttcgctcttgttatgcccaggctggagtgcagtggcactatctcagctcaccacaacctccgcctcccgggttcaggtgattcttctgcctcagcctcctgagtagctgggaattacaggcatgtgctactatgcccagctaattttttttttttgtatttttagtagaggcagggtttctccatgttggtcaggctggtgttaaactctcaacctcacgtgatccgcctgcctcggcctcccaaagtgctgggattacaggtgtgagccactgcgcccagcccccttctgttcttaaactgtgattggtttgtgtttggtagaactgggaccacacaaactgctcttaaaacagttcccacatgcctggctaacacctggttttctgtcatcgttcccttagcatgctgcttttcatgcagctggacctctgctcctgtggccctgccgtcagatgcaccctcgcttccttctctgtcatgccaacctgtgctcagacctccaagattctacttcatagggaacctttcttaaaagaaaatttaaaaaaaactttttaatgtttttatgagtactggaaggactagtttatggcatgctctacccaaacactttctatttttttcagctctataaactcttgttaaatataagaccaattagaattttaggcaggcaagacacattggtgtgcaaatcaacaaaatacctcactgtgaaatctaggttttgaatttttaaagtatttcgaggacaccgctactagtttgcatataaagatatttaatgtacacttcatttgttaggtccttttctaaatttggcttgctatcctaaagacacaaattagaggtcagatgataaaaaatagaacataattagaggccgggcgcggtggctcacacctgtaatcccagcactttggaaggccgaggcgggcggatcactagttcaggagatcgagaccatcctggctaacacggtgaaaccccatctctactaaaaatacaaaaaattagccgggcgtggtggcgggcacctgtagtcccagctactcgggaggctgaggcaggagaatggcgtgaacgtgggaggcagagcttgcagtgagccgagatcgcgccattgcacaccagcctgggcgacagagtgagactccgtctcaaaacaaacaaacaaacaaacaaacaaacaaacaaacaaaaacataattttacatagatagcagctgtattaagctgcttcctttgtccttcttatttatttatttagatacaaatctccctgttgcccaggcggaagtgtagtggtgcaattatggctcactacagcctccaactcctgggttcaaggggatcctcctgcaacagcctcctgagtagccgggactacaggtgcaggccaccatgtccggctaattttcttatttttttgtagagacaaggtcttgctttgtggcccagcctagtctggaactcctgggctcaagtgatgctcctgcctcagccttctaaagtgctgggattataggcgtcagccactgcgcccggcccctttgtctttcttgtaagcacacacgtgcttatatgcttgaattctcactatgtcatgcaatgcaaataaaaaaaattgttacttcaatttggcattctagttagatctcattttttaatttttttgctctctataagaatgataaatttgagagtttgatatttcttcccaaaatagagaaatcttggtgtatatttccaaattcaaacctggcatcttacattttagtattgaagaacggtttgtcatctattcaacatctattcgatgccaggagtggtactagtttctgtgttaagcataataaacacaatcttctcctgtgcactagaacctcactgtcatggtcccacaaataacggccaaaaagagttgaactcctctacttgtaaaaaggctatactctgacttggtgcttataaacccacatattcattattcagagtgacacaaagagaatgacccaaaagcccaggcctaggcaaggccaagttctgcagagataccagtagtccagatgctgatttacttcatgtactagaataatttttttttaccatttcaatttttcactatccatgcttctttttttgttctcaacatgtgcccattattcctggtaattttggctttctgtctgcctttgctgtgcttagatatgaagttcataatgttgccccccaaaagcaccaaaataggcacaaacctagcagacatctggttgtccaatgaacccttacattggcctagagtagtggttacttgcactttgccccattgtggctcacaggcatgatttgttgaatttacacagtgtttatgattcttttcttcagttaaatatggaaggttttacacaaaatgtcttgatgatgtagcagtaatcgagatgtgtctagtggctactttggagggagtgtgtgttcccattgcaacaaaatcatcaagcagtcttattcatgtgttcacatcaacgtgatcttaagatcatgatgactggcccggaccccagtaactctgaatggcagctgatatattttggtaacggataagagttgagggtcagtctcagtgctaaaaggtgaagagccaggtctgctgttgagcacaagtgaaggaaggaagaacaacctccatgtgtggaagacggtgaatcagggcagccacatcttggcccagacagctctagaaggtgcgctcccttcgtagccactggttaagtgtaatattataattttccatcacatggtagtaatgtgtctggaggaaggatcacctttttctagatcatgcagatcacctttgggtttgttccctatcgaaagcataggggaacaagtaagagtaaagtttgcttttaaaggatttaaaacataaatttaaaataaaaatattgtcaagggatagaggaatttgttgttaaaacactcaagagaataaatacttgtttagttgatttatgtaagtacagaaactaaaataattattttttatttgttaaagtaaaacttctgttctctactgtcaacctaatttgaatgcctgtgaaaatataaaatatcagaagttattatttggttggtgcaatagtaatcgcggtttttgccattacttttttttttttcttcctttttgtggagaacggggtctcactatgttgctcaggcaggtcttgaactcctgggctcaagctgtgctcctgcctctgcctccctaagagctgggattacaggcatgagccaccgtgcccggctttgccattacttttaaaggcaaaaaccgcaattacttttgcagcaacctaaaatgctgtttcaaaatattgtgtgattctgataacacccttcatggtttatctggtgaaacaaataaatataaaaacccaggtttacatgaaatagaatcagtggaataattaggcaatttgtggaaggatactttgcttttaaaaactgtaattcacagaacaatttcattggtttctttttaagttggtagaagaaagagtacccaatacttacaatgaccttatctttaagtagtcctgttcttttgaggccaagaatcttttatcgtcaccctcagaattgggttctggtgtttctcccttggcttccgtctgtttcttcaccattaaatgctttcatctactttctcactaggaccaaagtgtcttttaaccatgcaaccttcttaatggatttcagtcagatgcacatagaagtttggtattcctgttctttatctttggttaattgtgttttttcatgaagtatattgttattgaatttattatcttaaggggaacatctcattcatttcattacccagttgccattgtcatatgaatgcttgaaatttcatttatatttcattaattccattgaactttggaatcataaatgcatgattcttcaagagcatctacattaagaaacgtttcttatgtgacattgtttccagcctcctttatggctgtggtcagttctgaatctttgcatcagaaacaaagatataaaatgattgtcatgtctgtatccagagatctagtcaataggtatatttctgaatacatttaagaagtaattgaattgcatctgatttattcatcattcttaaactatttctttttgacaaactgtcgtcaccaactctactgcagtttcctcatttaatgttctccttctactgggagagttgagctgccttcctttgtaccagttttcatttttatttaaattctacccagaatatgactgtagtcctttggtttttccctcaggtctgtagagtcatttgcccccttttcatttctgcccttctttcatagttgaaaggaaacttcagaactcaaatgctttgcaagttgcgaacccattctttatatcatgtcggtgttacagactgcttaattatttttctccatctggagaggcttagtaattaaatgaattgcagcacctgggattatttatagacattgagaaggcaggaggagttcttgatgactcatccatccagggctggcgaggaagcctttctctccacttccctgcatttcaccttccccctccttccccaccataggtagatatgatctgtccttcctttgacccactctgacttatagcattccatcttgtattaaagctgttattttacttgctttcttctgcattaatactgtgagatcattgaggcttgagagtcttcattcatcattatgtctcttacacacggctaaaactgtggcttgattgtgtaaatacttagctgaatttcatggaaacacatttaggctccattgtctagattggaaagggacagcctaatagcttattagctacaaattataaaaaataggcattagggggtagagcctgagactactagagtataaactctctgaagttgaagtctgtgtcttgttcctcttctttttgtataccaccaacccacctttccctagccctcacagtagtgcattgacctcaattattgctcaggaaatatatactaagtaaaactgagttaaaggaaacctctgtgttttatcacattattaattatttgggtttttgaaaagcatatatctagatggctgtgtaagcgtcacccaaaaaggttgctgtttgtgtcagaagtgtaagattcttgagctggtcaaggacattgaacatgaagactgtgtaacgattcattgaggttggtacctctctttcctggggctccattggatcaaacatgttaaagggatgcatctccattctatagtgcgttcagaggccttaaaggactgttttactgtaaagagtatctgggtgtatctttataaggtttcccaataaaatgcgtttatctcactaggtgatgagtgaagagggttttttggatcattttgctaattttctttcccattgtctctgcctctttcttgcatttttctttactagggttcctctatgatagttgatgagttagcttctgtgtgttttagttcatctgttaactttttcttgctcttgctattctttacatgtctatgtttttctgcctctttcccccctttctccttcagattttctaagcaaacaatgtaagattttcttgcttatgtattcattcttgcattcatttgctaactcatttgttcactctgcatatttcttaagcaccttctctgtgccatgctccatggaaatcatgaggtatcctcagaattgtgtcctgccctcaaagtagttgagggacagtaagttttcagaagggccttaaaattctttcttcaaaagtagcttcattttatctttgggagctaggggaggacagatcaagtcaggcagataaaatctcaagagaataatgcaagaattatatcttatgtatatttttaaaatgataaatatttcagtttgagagtatgaagtttcgacttgtaaattttagaattggactcttctttctccatttttcttctgttctggtataaagcagaacaccactattaaagtataattcattccttttatttatggtgacctaaattaatctttttattctttttaactatcccaaaagagtctttttctttttttgatgaagaataaattttctatcgtgttatggttttaatttttttttttcttttcatggttctgatggcagtgtgaaacaagggcctttaactctggagagagagagagaagggataaattagtaattttacccatctaccaaattcccaccctaaccccagacccccagaaaaaaacaagaactatttttgagtctgagaaaattgagtttgtgttggagaatggtggtagattatttagaacttccttcttagactgctttacaagataatgacggtaaactaatatgattcctaatttattcctttccagttgctgctgtttgaatatcgtccttctggcattttccacatccttggttttatccagatataagttcaattctttcactacattacctagaagtgcaatttcagaatgttttgggttgattaagaagacttttttttaatccacaaacaaaaattaaaatacatatgttccaattaaactattttaacagctaattgatttcataggacttaccattaagtgaaggccagagtcattcttaatgttcaattgcagttttggaatagatttgtggatgtacaacattgaatttatagcctatcaggtgttttcagcacatcttcttctgcaaatggcctgtaattcaaatttcctcttagtggacattacagaggactatttaattattggcgaagcattacataattaagagactttgaattctttgaatgtgaccatgtgaaaatctatttaaattaaatcattgcacttcaaggacgttaccaagtactttgcttttgtacatcattgaatgatagtttaaaattgttttggccattagttttcatgtaagtcacagaatgtgattttcgtaaactcagagaagatcttaggcactctgtagtaaccttactatgacagatgacaggcctgaccctctgaaaggttaagtgattgaccgtggtcccctagctctttgcagtctgccaagccaagaatttgagttgtgtgactctcaatccagcgactttgttttttcctagatttggtcttcctggaatatgacctagtaggatgctttagctgattagatttatcgggagaactcctgacataaagcactttatattcacaaccgttcttacctctctttcctcccccagataaattagttgcaagatgtttctaaatagaatacaaacaccactaataaaagttaacatttgctgaggacttaactgatgtaaaatgctaatgacaactactatacagtgtctcacttaatcttcactgggacccctcaaggtattattacctccattttatagatgtggaagctgagacatggagcttttttcagtataaattactcaaaattacacaggccactaagtgttggagccagcatttcaatggcaaccatatatctccagggtctgtgctctcagtgaagaactgaatgggaaaagttgggttttctgttgaagagggtagagggagaagtatatattattggtcccagttattgtcatctgcatataattgccttcaggcctctcagttttgctgatagctgaagaggtattttcttgtaacttaaaattatgttcttctttttgtccatagttacaatcttcgatcctaaattatcttaggctgtgtgtctgtaattattttatagatttgatgacatcttttttctttagtttcctcccttttataaaaaggctataaagagtatagaataaatgctgtggttatgtaagcatagtgtgagtgaatggggtaaagatttgaactttgaattgaatgtattaaccttttaatggcagcagttctgaagtggggagggagggaatgggggttttgccccacaggcaatgtggccatgtctggaaacactttaggtgtgtcagggtagaggcactgctggcatctcacggagagtgcccaggaacgctgctgaacatcctgcagtgcacaggagagtcctccacaaccaacagttagcagcccaaaatgtctgtgctggctgaggtcaagaaactcagctttatggtcatcaactagctaagtgactgaagatatcagaatatcttcatctcggtagaggggggtcagttagggctatttgggttattttctgcaggccgaaggccataagaataactaataatcccagtcctaagaactccagtagtccctggctaaccaagacttgaacaactgggattccaacataaggtgcaaaacttgcatgccaaaatatttaaatctgccctattcctacatatcctaggtttacctccgccctgttaaattaaagcacccacatgggtatttgtttgcagacactgcagtgatttttgaaacaagcaccaatttaatagaacattgacttagatgtagaaaagtaaacagaggtaagaaggtaagagcatgtacaaatgcttttgaacttgaaatcagcgagagctagtttaaaaaactcataggaagatcaatgaaactcccttgcagaggttgtaggagaacctgcttctgtaaattacagcactacacagtttccttagcattatagaaggattttcccaggacaggattttaaaatgataaacgctggcttattttagagggttactgttgtctcttgcgaaatctttttactatctggccatctaggcattgagggccaggattattaaccatctttaactgtatgcatacagatgctactcacctgtgcccatttgagaagaactttacaattctcttttgattttgttgttcagggtttacactgaagctactgttttctctatctacagcatcttaacatttatgatatgtctcaacccatctgaagcccagaacttttgttctttgtcttttctggataatgcctgcctgtctcttgagtatccctgtgacccacattcccaaagcagatatcatgtacatcacatagattatattttaagacagaccagtctgcacagatctttctgattttatggaaatacatccaaccatttttacatgatgtgatggcaaacttggaagaaacttaattttatttgtccgtgtgagactttttatgattttccccatgttcctctttttctgttaacatcttgatcttggtaacactgttttgctgattgtgatatttttcaagaatgcaactcctgtggtttgtaaaggattaggaaacggtctattgcaagaacgtccatgatagaaatattttatccttcctgccttttaacttgccataggtcagaatctcaatgtgatatagtaaaagacacagtagttggtgctcatatcatctctttattatgattgtacaggtgtcttctgagaaaatttttagcatcaaatccccgtttggggtctgttgggagctatgagcatagctgtgcattcactcacctcaacaagctggtacagcaaattctatttttcttggctcattgtgttctctgagtatgtattaagttgtatgatttttttgtgagtgtgcaaattcctaggtagctgtataaaaatgatagaagagagctaactaatttaggtcttgcgtatttagaatttggatttgtccaaagttgatgtaagccaagaattacttatgcatttttaagaaggcattttattagacacatcaggactgtaaataaaattgcaatgggaggagttgctacctccatgtatcaactggccattgtcaacccattttatgtgggtatattcatttaatatagccctttggttataacagaggactcttatgtgttcacacaaatggatttggtgagagatacttctaaaattacactgtcagtaatttgtttgcaccacatataataaaatgttctgcatatgaaacaatactcaattctgactcttggataattcacttccagggacttctccatccatattactgaggtcttactcaacactgtgcagcgtattccctggtagcttggcatccctgaacaccattctaatgaggtttcagtgaattatttctatttttaggcactcttcaaaggtggctgccagacactagttctagtttttttttaaactgaaccgattatagggtttagtgccagatgcttcagaaatgcaagcagctagctaacacaaagccaatacctaagtcttttaggaaaagagatgaatgtttagggtcatatctgaacttagtagcacagctactcccccgctgccctttttaatggctgtcagaccaaagttttgtggtttctctctattttgaattttgtaagtgaaaaatgtcctcatccgactaaaacagatcagacaggtaaaatcccaagtcttctgaaaagagactttcagtgtctgactctctttgaatattaacaatagtaaaaataacagtaggtgatatttacggactctgctcatgtgtcagcgcctctgataattctgccaagcattctatgtgcgttatcccatttcatgctcataacagccctctgagaaggagattctgattctagaaccttccccagatgctaagagtccctttgattctgaaatccatgtctgaggtgttggagtgaggcgtctatgtataaattccaacttgccacttactggcttgttcctttggacaaatctattcaatcccatgccacttcaatccctttgtccataaaatggaaataccaatttgctgcgaacttcaaatgagataatgtctgtgaaagtactgtggagaggtctttgacccaaaaaacattttgatgataaaaatagttaaaataacaatgttgatgatgataattagcaacgactagggttaaaaaatgccaaaataaaaggaaatactttgaaccattacttccccataccatgaagtctgtcccaggacatatatcgcttcagtatgtcaaatatacacatcctcctggcctacttgcatgttgttggagggtgcttcagatctgattgcagttggctgtgagacaaagtcttaactagttgttattggtgctataactcagtaattcaggaggaggtaaccaaattcaaatttcctcaaggagcatctgcatgtctttcttactactttaaagaggagctaaagtaattagtcttaacaccttggatgataaaagaaatagatttaattggagcagccaagtcggctgagagagagacaagtaacacattgatatggacccagatgcctccagatggtggtgaggccattagaacgtaaaagggccctataagattttcccctggaccccaaggaactgcttaattcctagtagtgagttcctctccagggtcaaagtcataaaacggggatcctttatgtggccctatgtatgctggaaatgtatcctttcctgtgagcttccttattagtgtctacttggttagagacaatgccagcagtgggatgtgatcgttggagattttagaatactagggcatgggaattattacctgttctggcaatttatttcattagtcccagtgtttgccgtggaggggaggtgggagttgagtgggagatgttattctcttctatatggggcagtcttgactcttgagttccccatggtctaaagggacgagatacccccatacagcatcccacctaccttctctcttgtgtcccttctcttgccttctttgttcatttcctttgcaatgttgtggaatcactatagtgtcccatatatggtggttcagctgctgttcacagaactgaattaaacgtggtccctatcattagggaggttaccccttatacatggacacacacacacacacacacacacacacacacacacacacacacacacacacacacacacacacacaatctgtaaactccttaagacaaggaccggccgggtccagctgcacatgcctataatcccagcactttgggaggccgaggcaggtggatcgcctgaggtcatgagttcatgaccagcccggccaacatggttaaaccccatctctactaaaaatacaaaatttagctggccgtggtggtgggcgcctgtaatccctgctgctcgggaggccgaggcaggagaatcgcttgaacccaggaggcagaggtttcagtgagctgagattgtgccactgcactccaacctgggcaacagagcaagagtccatctgaaaaaaaaaaaaaaaaaaaagaaaaagacaaggacctttgcttgtttggggttaatatcctcaatgcctatcacagagagataatgaatgaagacattccttgtgagtcagcttggtgaagaaaatggactctaaatccagattgctcaattaaatctcagttctgcccattagtaggagtaaaattcagtcaagtacacttaacctttctgtgcctcagtttcctcatttggaaaataggaccagtaataagagacctaccttggagggtcattttgaggtttgtattagttaatacgggtaaaatcaacaggtgactggtatgtagtaagtcctcagtaaatactagctctcattataatttaaacaatagcatgtgcctgtcatatgtgtagtgataaacataagttaccatgtacaacagttgtgcagtgggaagggtcgttaacctgcatgtgtgagagaggaaaggcattctcacctaacaggtttgtgatgtgttactattttctgtttcttcctctccaaactcagtgggccgagaaagtgtaaaacaactttcctcaatcatggctccacactggaatcactgagcaagctttaaataataccgatgctcaggttccacccctgggatttagatgtaattggtccaggagatggcctgaacatcggtatttttaatagctgcttgcgtgattctaaatagtgcacacaggttgagaactagcagagcttatcagagatcccttgaggtcccttaattgccctccatcccggctcctatcaggctagcttgctgcttaggcggttgatgattcatttaggccatactctggggactctagttttcttaaagagcatgttctcaactcctgaggttcatgatcctcccgccctctgcttcccagagtcacaccagtccaacttgaattctcttctcattttatagtgaacggcaggaagccaagtgatcagacgtgccattgtctgttggtttccccaccttggtttattataaaaagtagtagtaatctcacaggtggaggggagcgtggtcatttgtcccacctcattggcaccaaaagaaacccaggtatgagatttgctcataaggtggattggaggatatgactggcaccagaggacggtatacgttttcatgcttcctcccttggagatgagcatgtggaacaaggcctgcctggcctatcaactcaggtacaagggattaggagcaggtgcatggttggcccatggacctgcatatactggaggctggaagtaagatcatcccctcgggctgttgcctgggaagatagctccagaggaaagggctgagcttgcttttccttttagtgaacctgcattaagatggacctatccttaccttggggagaggtagctgggggtagagagggaagaaagacagctttttttccaagcactttggaataaattagttttgctacaaattactacatctggtgagagaggaagggcaagttcttaccttctctcttccttttcctcctgcttctcctattaccagtaatattaaggaagaaaactttgtttctgtgtgccagttcatatccattatctgctttgatgcctcaaacctgtaaagtagggacttctatccccaactgacaaatgaaaccaaggaacagagatattcaatgatttgcccagggccactcaactagaaaacggtaggatttgaagccatgtctttcttactctggaggctctttccctcttctgaacttcaatattaggctgcctcctaccctcctggaaactccctaccccctttttcttccaaagagtgtggatctagggtagggtcagccactccagtatatgtctggtcatcatcccttggtggggtgcccttgtgacaatacttaggacctaagacaattaggactttgaggaaaagtctttttttcagtggagatcttgtactttggaaccacttcttctgcaggtcgctctctcctgaaatctggatggtgctatggtcgtgagagcttcgtgttttccactagtccacctccagacattccgttgaatacctatggaatctcacttcaagctcatacaaattggttgttgacggttattgccatgcagctcccctggtcccattgcttcagtaaaagattttggatattctgtgccaggatgtaccaggctctggcagcacctgctgagttgctcagtacccagagccagttctcttctagtccaacgtccccactgaggctatccagggcctatgctgagaatttgtttctgcagtggaccagaaaagatgcttgtcttatgagactggggagagtagggaggctgatggacccctcagctgctgctgaaactttttagaagcccagaagcagttctgctcatgcctggctgtgttctgccaagaggcacttgcagatattcccacatcaggaaggctgcgacctgccgcaaaggagcagttgtatccacaggccgactgtgccatgcagaatggtaatctaccttctgtgcctttatcttccagagcagcaacatcataatcttctctctggctttataaatgatgaaatgtcgcacagggttttctgtcaggcaaacatgtaaaatcagcctggatacccagcaaagtaccatgccttccattacatccttgttatgaaagcttcatttaaaaattcttgggtcataaagcgaagagagagcacggtgtaccatcaccagttgttaagcagacagtcttggtgtcagaggggactcttacgccgtgatgctatcagttacagagaatgtcaaagctgcatcccccatgtgaccttcagtgaggcaaaggaagaatgtctacaaggagatttttgtgaggtggtgtggttgcagcctcgctgtggacttaggaggctctctgggatacaaatgacagcagttagaggttacaccagtagaggagatcacgtaccatcctgcgttctcaatgaaagaagagtgttactgtctcagcctgtctagcttatacatatatagtataacctggcctccttcagtattcattcatcagctatttcttgtagccaactgtatgccaagcactgtgctaggcactgaggctgacctgattagagaatacctgtgtggccttggtctttgtggacatcacaggctattgggggaatagaagtttatcatgtaaatgtgccaatggacatatgattcaacatgtgtgaggtctagtgagggaaaaagacattgattgctttgagagcatgtgatgagggtcaggtccaggtttgggggagtcaagaaaggctctctgggagaagacaggattcagctgaagttaactagagtggaaattacaggctgagcagaggagattctcagctactagcaatagcatgagcaatggccccaagcaggagaactgagtgctcaaggaccagagagaaagccctcaaggctcaagctagagcattgacttcactagaccacaaaaagagccttgaaggccatcagccctagacttttcttggggagccaatgaaaaactggcagagcaaggggactaacttggttggcattttgagcagataaggagcactaccgagagagttgagctggagagaagtaggggaggacacatgggcacccctttggcaaaaagaggagagatggtggtagctgggacctcgggaaaaatgatatctttctattaccaagattgtaaggattttatcttcttatataggaggaagggagtttgtttcaggctctgggagcatgcatttgaaccaacttggtgactcatgaaaataacgcttctggagggtgaaagcaggtcagaaggggctttagaaatgctgctcactatcaggtttatagaaacactgttattgttttgatactggcaatttttctgagctcactttttgctgcttttctcatttgatattttctcctgtcgtctttatttcttgttttatgtgtgttatgtgagtgtattgaatgggctttctgctttcttctggttctgttttaattttggagagctggacaagggcatgattatgatgatcagctcatgtgtatgttttgccatgtgttatctctgcaaatacaactggctgctttccattgtaaatgttaattttgcagccatattgtaaaacctgtaaatccatagattgaacttcttgggggatttcgttagtgtatttctgcaaacagtccattgatgtctaatacataaaaatgacagtcagcatttatatagtatcatattattctctccaccctcagagtttcaggacagattgatgaccaggctgaaacctgattataattatccaaataaaagaacaaattaggtggatggttcctagctgcattgggctttaatgccaaacacattttatactcagttataatttgcagttccaaagacctcccatttaggtttcatttgtagtacagaaggatttttaaatgtacacagtttactagcccatcttagaaatatgaagcaaaaatccgcccatcttaaaagtgaaattatgggccaagctggcttaagttgacaacattagcaacccactgtcagaaacacaaagacacccccagccagccattactattatcacgcgcttaagcaaagggcaaactcagagtttctttggaaccgattgcctttgttccacttagtatcataaaggagatattggctgtaaaacctaatggtataagataggcttggtaaaggacgcccttttcagttccttcagatcttgctcatgtaatcttccagctgagaagtgagaatgtgactcctattaaatgcagttcaggatgttctgccaaaggcgatattactccagacctgtgtccgttccagcaaatgaaaacctaaataagtcccacaacagcaccgagtgttctctaaaggactgtggtctgacattttcacgtaaaataaactaacactcataagtaatggtgcattttcaacatgctcgtgtgacaggtatatgaacgcgattggtggtggggggcatatttttgggggcaagagaggactcctcattcacccttccccaagttagaaaatgccatagcatagtaggaatgcattcaaaaaacaaatttctagatgatatcctgcatatgaaataaactccagtcttttgtaccatctgtatctagcatacttataaaatagaacaaagtgtgcatttttaataaagaagcatggtgttgattttcttcttcagtcctcttcttcttttctattattttataaggtacacaaagtatattatttgtttttaggaatattttagtggggcaacaagcatggccaaacattatctcgtgaagcactttttagaagaggaagcatttgagattctcaaaagcactttcagtgaaatgtttttaaatgcacattatgatgttaagaaattaacttgagttattaaagcggcaagtatgttagactaataactactaccatcatgctttcccaggtttgaagagctgctatcacagagatttaataattctaattcgaggttatcttcattaagaatactaagctttagaatgattgcatgactgataaaagaattagaaaaaatagtttaatatcaatttactcttctatagggcttgacaatttatcaagtgcctttacctatattacatgatttgatctttaagaccagtacaagccctccatatccttgggttctagatttataaattcagcccaggaattgaaattatttgaaaaaaaataaaaaaaaatacaacaatatgaaatcatacaaatgaaaaaataataccatggtttgcatatcacttacattgtattaggtattataagtaatctagagatgagttaaagtaagcaagaagatgagtataggctgtatggaaatactacaccattttatataagggacttatgcatctgtggatttgggtatctgtggggttcctagaaccaatcacctgtggatagtggggataactgtgggcaaataaggcattgtcaattttatcccaccctccaccttggccccagcttttattctggccattaaaaaaaacagagttgggggaaaagatcagaggttaagtaacttgcccaaggtcacatggctggaactggcacccagaccctgtagcttttatttctgtattctttattaccttccaggaaacctggtttttctgtagtagttggccttttcttaggttttatgagtggacaggttctgtgaatattctagaagacatgctaagtatgtttatattttctctcagaaagctagcagagtctggtatcttccaacctttcatacttaacatctccttgttaacagatggtagaactgaagggaatgcataaacttgaagggttgtggtcacagaatatgttctgactccagatataggggtgtgaagtgtaggatgttttagaaacaaaaggcatatcgtagtgccactagacagacacattgtgagatgatgcatttttgttgtaatttagaatttagagttgtttgaaacaggacgtatccctgatgcccacctgcctacacatatagttgcatttcttatttgctcttgaaattcccatgtttaggaattttcaccactggcactaaaagtggggctcttgtccaggatttgatggtatgaggaagatttgcctgaatttgtgactcagagtaaagcaataaaatccagaggtccagtagttgaagattctcataaccatctatttctgcctcaccattaattctggtgtaagcaagcccttactgtggaatgtcattttttgattccttactaaccgtcgctacttcctagtctttcaaaatggtattttaggcctgaaaattaattctaagaaaatagttcaaatactagaaaagttgtggccgcaaaagtgttgattccactcttatgatagtgaaaattgttaggaaaaaaacacaaatgcccaacattttggaaattattaaataaattaggtccatcctgaagttggaattatatgaccattaaaaattacgctttatgttcttacacagaaaggtggatggaaaaaaaaagaaaaaacttatgttttatagagacttttaatgacatgagccatgttattaattaatactgttattgataaaatgttaataccataagcaaacactgcaattaagaatagcaaacacgtatatggttcttattacaaggcactcatcaaagcatttaatatatatatcaagtgactttgaggtaagtagtcatagtacttaagtgttaaatctttttttttttttttttttttttgaggcagagtctcactctgttgcccaggctggagtgcagtggcgcgatcttggctcaccacagcctccgcctcccaggttcaagcgattctcctgcctcagcctccggagtagctgggactacaggcgtgcaccaccaagcccggctaatttttgtatttttagtagagacagggtttcaccatgttgaccaggctggtcttgaactcctgacatcatgatcttcccaccttggcctcccaaagtggataaatcttttaataatgtaatttttagatgaggaaactggaatctagctagtaggtcacatacctaataagtggaggagcaggaatttgaacccccgaactcagccacaactgctgtttaccccaaataaggtccacaaatcatgacacaaaatgtgtttttgtgtatgaaaaatttagaagggtctatgacccaattctcagctctggtgacctgtgtggtgggaattggggtgacttgttcctgttctagtcttttctatatcttaaacagaaaaccgacactttggttattacaacataatgcaattttaagtaaataagcaggagccgtctttaccctcctgggatttccttgtggccgaatgaaaacccacccctacgctgtcattttatgtctttcagtttctgtgcagtcagaccacagagaggggctttcttcaccatggatttggcatcccttcagttagagagtggatctggacatatgccagatttgcctggatgtttttctgctttccaatcataagccaaaaaaacaaaaaaacaaaaacaagaagcacacaggaatgtatgatttgaattctggatctctcagttcccatctcttaattttttagttgtttggctaaatgcttgggcattttagccatggaataaatactagtaaagactttatggaatacgtagcaggaggcatttttaaatggtgcactgtttccactgagctgtggacagatgggttgtttataggctgtttcatatccagcctccttttttgttttgtttcgttttattttgttttggtcttttgctggtgagaagtagaaccacgcttcttttgttctttttctacctctctgctaaatcttcttttatatgtaatattctttaaagtataatttgcaatgataaagtggcatccaaaatgctaaaggaacatgttaagacatttgaagaatctctttcttctagaaagatgtatgaaaatatttgttaataataaatgattgagggtttgcttcagcataattggaggagtgtgaggatgtagacagaagaagactggtcatgaagctgagtgatgggtacgtaggagttcattacacttattctttctacttttgtttatgttgaacagttatcacacaaaaaatgaagcagccacttaactagtatctcagcaattctattgcatcacgagatgcagcaaatttagtttgaaagggtaattttcaggaaagaaaactttaacatagaacttcagtctgtaaaaaccaaaaccaacaattgaaatatggaaaattccgacaggccatcacattgtgtgcatacggaatctataccatgccaaagaataactgattgttcatttcaacttaactttatgataatattattaatcagttttgatatgtttaattatggcttttgagctttaagccctttataaacacttcactgtcttaccctttactactacacaagtatctgaaatgttcactttgactgcagactctcagccttccaggccatcctgcagtctcccttgatgctaactaggagcacttttctttcatcgttatcctcatgtagaatttggcagtggcctccagtggcctgtgaataaaatccagatgttttagtttggcccaaacctacccctgctgattgatttcttctcctgtgaaccacttcctgggaatggaaccacatagagcaaaaataatgaactatttaaaaactcttgatacttatttccaaagtcttcaaaaacagttgtaccaatttgcactcccatcaagtatgtaactctgcccattttgccgtacacaaataaacagcaggcattattatctttcaaaatctctcctgatgtaagccaaagaaaaagtatctctttctttttttaagttatcattgagaatggacttttttttcctactttgattggcattccttctttcctatttaaaatgtatttgctcgtatcttcccctattgttaccgtattccttagtaatattttggtagcaggatagaggctcattgtgtgttctcacatgtaaacttcctgagggggtcttgtttcttatccatttttgcatccttagtgcctggtctagagcttagcacagcgtggatacttaaggtaactgttgccgtgtttggacacctttctttctgtcttcctttctttcctttcttccctttcttttctttcttttcttgatggagtctcgctctgttgcccaggctggagtgcagtggcgcaatcttggctcactgcaacctccgcctcctgggttcaagcagttcttctgcctcagcctcccgagtagcgtgggacaggtgcacgcctccacgcctggctgatttttgtatttttagtagagatggggtttcaccatattggccaggctggtcccgaactcctgacctcatgatctgcccacctaagcctcccaaagtgctgggattacaggcgtgagccaccacgcccggcctggacacctttctttgaaaaatgaaaatgaacagagtggtgtccattttgagtgggtatttctataatactggttgctaggaaatctgtttttttttctcctctgcagaataaatcatcactactctctgccggtgacccctggagaggtctgagaggtcagtggctacaacacaggaataaatgtccttctgatttgtaagctttgttccccatatcaggagcattggttaggaaaaagaagtgtattgtgctgaaatctaaaagttgctcatattacagggcacctaccagtaatttctcatgccatcatctaaattgaagacttagtattgttaacaagttttgaaaaggcattttttagcttgttcctctagattatttagtgcattttcccccactggtactaaaaatcagaagttaaatcacaagtctttctgttatatcctaccagcccatcttttatgacatcctgcttctcttcttttcttcctgtaaaagaagatttttgaacctataaaatcactttttaaaatagacattttttcctaaccctcagctgttcctcatcaagttttttttttattttattttgtgtttccagctattggaacattcaacctcaagactgtgatctttctgtggcatgcttggactcatagcacgcggaaaggaagcctgtcttgtgcattgttctaggacaaagtccattaagtgaaggtcttaataaaatattgaaggtcttaatgaaatactctcaaccctcaccagctccccaccagtgctaagcagggttttgccttctcctcccacatgtctaactagaattcttctaaaggaataaactaagagcaaaataaaagttatccatctccagcgcctgggattccggtctcacggtttttaaacctttttcctgtttccatagtctgagatgtgcctagaaaggccagccctagaaaggaatacataattatcttctagtttgctccatctccttggttcccatgaagaaatttcaagcctatgatgccttctcctacagatagatcctcttttcattctgatgtcattttgtgacagttggtgaataaaagcagcaagcccaggccaggtggcagagtatctgtgtctgcattttgatgacacctgtcatcagagaatctaggcacacaggctggggcagcatccatggacgaggcagaggaagtgggtagcctagaaactccaccagctgaggagttgtttcgtggtctcaacagcttgtagagtgttgatgtaattttgcaggtagacccaaacctttaagcaacttgcattttaccaagagttgctcatcatttcaacctctcactcgctattctcaccatcagatgcagaatcctgttgcaataaaatcataaatgaaataaaagcacagtcaaaactgtgccatccctctgattaaccaatgttgttagctcagggtctagagtattaggtatatttttgttactttatggagcctaagcttgctgctacatgggagggagctctacttgctttacttcctgccaaaacgcaagatgcactttatgacaatactgatttggaaccttctagggatttttttgttttaattgccaatggcagaaggacactattatggtactattttatacaactcatggactcaggcacagtgtcatggtgaaatgattgtatatagccctgctggccttccatctcatactccttccatgatttgtggttattgtcttcttttgctttgttttgtcagccaaatatgagatttgagcatgaaatcgtatagttttagaaattccagaatacttctttaatccctgaaagtcagtacaattctacctaaggactttcagccctttgccttgttatctgaaaattgtctttctctggataattatcttgactttatttatttgctcattcagttatccacttagtaaattatgatgaagtaccttgtatgcaacaggcagtaataggctatttcgtagcaatttcagtgtccagtggagaaatgtagactagtatttgtgtttacgccagttgaggacctttttaaatagtggacttgagcttaactctctgcttcttcttgcttttgatgaggaacagaattcacttacacatttcactgggaaaagaccttcccatgtgcattactactagcgggaacaaaagctggaactgatggtctgcaaggtcatatgtcatcatatgtcaaaaacttcagagctttgcagatttttttaaccttgcattatgctgggattattgcattgttctagaactattgcattgaaaaaagcctagaagtgtagtaatcaaaacaataacattgcttatatctaggtaataggatacatttttatttttagtttgcctattcatctttcctaatttctttgcagtttattatacaataaagaaatcatcattacttaaacaatatagttcaggcaagaaacgcctcagttaaaagaactgtggtcattttggaatggtgaattgctgtattttttattaatggatctggaaacttcattgctatagcgtgatgttgggggaatgaaacagttgttcatagatatttatgcatggagctacacaaagacaaataacatgttttagtcattgtcagtgggaaaattggttgtatttccagggcatccgtattagcaggagtagccaaatagctatattaatgttctggtgtgtgatctgagttaattactgccatagttttgttagacttcgacatgatttcttttccagcaaataaaacttgagaaaattcaagattggtattaattatgttgctccaaatgaatttctaatgtagacaactaaaatcaacaactgtgaagccatactatcaataggagagtgaagatctcctagcatagacatagcatagaaaaacctcattttgattttcacctccttacagataagattagtttacttgtctagagaggcatttaagaatagaaggtttcctgaagactttctggaggagaggctgatggaattgcctctgggtgcgtaagaaattagcttaaagggaacatatgctagagccacaatatgggtggatttggtattattcagtctgggcagttgaggttctacaaatcacagattctatagtttttagagataccatggagtctttgaggtataatttgtgaatcaggagctagtcagttgcccaacattcatatgtcaacgtagatctcttggtgtcttctcaaggtcattaaatcattcacttaataagcgtttaatgaacattccactatgtgcctagggaacaacaatgaatatgacagatgcaagctatgctttaaggatgtctggtaggattagttttgtagaaacattaacacatttagagattttttctgccttataaatatcaagactgtatcacagtaactgatctttatagtcatcatctagaaatgaagttcctaaattttattttcatggtgaccttactaatctatatatgtgtgtctcccagataaaacttttatctatagcaaaactgaaaagaaggtgatatgggcagattttctaaatctatatggttttgccatcatggaaacagaggtagaagaacctagagaaggttggggagggcatcaccaattcacagtgagtgaactttctttgttactggactctaacatcacagttgggtagcacctttgtggtacatctcagcagacaccatacactaagcagggcattgctgaaagtcataactcaggaaagtgagatcagagtgcgggatctcttgtcagatatccaacagctaaatgttgtctgtcctggggcattaatagataattgtcttatagtcctagtcctgaatttttttggtcccctgcaaactcttaaaggctttttttttttttttttggcttgatctcactctgttgcccaggctggggtgcagtgacgcaatcacggttcaccgcagccttgacatcccccaggttctagcagtcctcccacaccagcctccccagtagctgggactacgggcatgtgccaccacgccttgctaacttttgtatgttttgtagagatggggtttcaccaagccctcttgatatctttggtgaaactatacatacctctaggaacagaaacagcagtcttgtgtttcatctggcctggcttcctctgatggaagtcatatacctaagagtattttaattgtatctatttccacagcactgagtatctttgggtgtatgacttatatccagtctcctttctaaggaatcatatggtttccataggaagaatataatgatcgatattaatacgggaaccttattgaagaggaaaatgataactgccttttctggattaccttcactggcaatataagtgtcaggctactctcagcattaagaacttgatttcctattttgaaccaggatctctctcacctgtaagttagaggtgttccaattaagagaaatgtgaaacagttatagaaatagaaacgacagtcatatggttggttatatctcacttttcacagttggcatccctgttaagaattatgtttccatccaaatcttgtcactagaatcagattcgtagttacatcatgggagccaactgttccagtgatctatatggcaaatcactcataccatgaagcatacttctataatatgattagtcacctcctaatttgagatttttgtgtccccaagttttcattaaaaggaagcttctgggctattaaagatgcattgatatgcctacagcatgatagatgcacatgaaatactcctataacagataacacaaagaagatagctttttataactcaaacaaaatgtttctaagtcccaggcaataacctgctaacttgaagacatgtttatttctgctataaataccagtgtataaaatgggttaagacccctctggagatttttttccatgtgaattgaattttgaataatatatggtacgtactatagtgaaagtttcttaactgatcttgtaacagagaaaatgtacaaaacacatattttggtgtctgaatactgatattctcttctcaaactggaaaactaaccagagtcacggtcaaagataaaacagtaaaaactcatatttgttgattcatccattcattcattacatgtttattgagcacctatttgtgctagccaatgtactaactacttactaaattcccattcttcttagttactgagagaaaaagcttttaatcaatgccttatagactttttagcatatgctgatgataaatccgtggaaatctctgcactctcactcagactctaatggaaagtatgccagttagtcatttattacctctcagttacaagtttgccttttcttgcccaactttgtaatcttggtgtagaaccctggaaacatttctctctcgctcttttttttttttattattattaaagttctgggttacatgtgcagaatgtgcaggtttgttacatacgtatacacgtgccctggtggtttgctgcacccatcaacccgtcacctacgttagatatttctcccaatgttatccctcccccagccccccaccccgcaacaggccccggtgtgtgatatttccccgctgtatccatgtgtcctcattgttcagctcccacttatgagtgagaacatgcagtgtttggttttctgtccttgtgatagtttgctgagaatgatggtttccagcttcatccatgtccctgcaaaggagatgaactcatcctttttaatggctgcatagtattccatggtgtatatgtaccacattttctaaatccgttctatcattgatggacatttgggttggttccaagtctttgctattgtgaacagtgcctcagtaaacatatgtgtgcatgtgtctttattgtagaatgatttataatcctttgagtatatgcccagtaatgggattgctgggttaaatggtatttctagttctagacccttgaggaatcaccacgctgtcttccacaatggttgaactaatttacactccctccaacagtgtaaaagcgttcctatttctccacatcctctccagcatcttttgtttcctggctttgtaatgatccccattctaactggtgtgagacggtatctcattgtggttttgatttgcatttctctaatgaccagtgatgatgagcttttttccatgtgtctgttggctgcttaaatgtcttttgagaagtgtctgttcatatcctttgcccattttttgatggggttgtttttttcttgtaaatttgtttaatttctttgtagattctagatattagccctttgtcagatggatagattgcagaattgcagaatttctccaattctgtaggttgcctgttcaccctgatgatagtttcttttgctgtacagaagctctttagtttaattagatcccatttgtcaattttgacttttgttgccattgcttttgatgttttagacatgaagtctttgccaatgcctatgtcctgaatggtattgcccaggttttcttctaggatttttatggtcctaggtcttacatttaagtctttgatccatcttgagttgatttttgtataaggtgtaaggaaggggtccagtttcagttctctgcatgtggctagccagttttcccaacaccatttattaaatacggaatcttttccccattgcttgtgtgtgtcaggtttgtcaaagatcagatgattgtagctgtgtggtgttatttctgaggcctctgttctgttttattggactatatatctgttttggtaccagtaccgtgctgttttggttactgtagtcttgcagtgtagtttgaagtcagatagcgtgatgcctccagctttgttcttcttgcccaggattgtcttggttatgcaggctcttttttggttccatatgaagtttaaagtagtttttttcccacattcctcctttaatagctggtgcagcagtgggttgtgcctgtagaggacactgggggcactgcagagggaagtcagaggtggggctttccctcctgctctctttgttgcttaagggccctgtaggcagctgatcagcaagagggaggcccaaccagtgccactcatctcagcagctctcaaaacagctgcagcccacaccctccagcagatgtctttctgggctgctccttctaatctatgctttctggtaaatttttccacaacccagtgagtcactcttctgggtatgtgctggtccgctctcactccacagagtttcttcatcacctagtgggccattcctataaaccatcaccagcacaccctctggcagtttctttgccagaggttccatgttcctgtgacattcatgccctctcaaggtctaaatatcagcctttgcacagagggccctcttctgagttcttagtttcttccttgttcagtagctctctctctattctagaaataatggctttttttttttttttttttttttgcagtagcttttcctgtaccccttagagacctccctccccatttttggtagttacctatcttttacttgtcagcaattctttatatattaaattttccctgctcaaattactgacgtggtttctgtctcctgacaggaccctaactgaaagagatgtgctaagagagaagccacctacaaaaagaattgccaccaaactaccaacttgtgaccaacagctattttgttcagcatgctcaataattgattttagtctgattacatcggacgttccataatcaggtgctgaatattttccccagcgcgactttattgagtacaaaataaataaatgccctcttatgcttccataatatgaaggcatttatccactcagtagagatttattcagtaacgtctgcaggcttggcattggagtagatgctttaaaaaaaaaaaaaaggaatgatacgctctaccttgcaagtttttcagagagacaggacttgtgtgtgtgaaaagtgcaatagagtttgcaaggcagcatacagtcccattagcatttgtattgcttcatatttctagactaagtgatgttgcagaacaccagtattctgttctatacaatccgttcacatttctaagagcatgagcgttcatttgtcttttcaattgtttcccactttctctgcatacacaatacttgctggtagaaattgcgagggctgtaagttggtaggttctctgtaatcaaggaaaataaatagtttctgacactagatctttgaaatggtgtctgaatatgcacactttggggctttaggaggcatctctttggctgtataaattactggaagcaagctgtgtgggatgaagcaggagagcttgtggaatgtcattgttttagagattgtagggctctgtgggaagtgattctagctttggaacctttacacagccaagattcttggagccagatgtagggagtctggtttctcttcatacatgtacactgtatggaataatatttaagatgttattatgccagaattgttgtagtgagttccttgagtggaactgtgtccccttctctgtgcatttcttgtagagaagttaagtcaaatcaacaggcagtgcctgcggagctcggaaactgttggtgaacgtggtattctggaatccacgaggccagcctttcccagaacatcctttgaggagcagtactcctggaagatgctccacctcgatcaagtcctggaaagtgatgtctagtctagcacagcttcctcttagagactgacagtgtgctttaacataataaaggctctctgataaagactgaagtaaaaagaatctgtcattttcttttctgtttagagacaaggtctttctctgtcacccaggctggagtgcggtgtcatggtcatagctcactgcagcctggagcctcctaggctcaaggaattctctcatcttagcctccaagtagctgagactacaggcacgcatcaccaagcctggctattttcaaatttttagtaggaacagggtctcactgtgttgtccaggctggtcttgaactcctggcctcaggtgaccctctggcctcggcctcccaaagtgctgggattataggcgtgagccaccaccgggcccattttctaacatagtattccagaaatatcattgtcaccctggatctttttttcctttaaatgtcaattgtcccacagaaacattgttttccatatgcaaattgaggatgttgattttgcatatctgtcctcaaagccctcatctacgtgtatgtatgtatgaatctgtaggacttaaaaaattttgttttggtgttctctgccattcttaaggacttgaatgattagataaatgaggcctaaagaggaaaccatgcatgtgagttataggaattatgatgagtaggcagtggcttgggttgtaccagaaacaccatggccccaggttgaagcccagtcactaccactttctttttttcttcttttttttttgaaatggagtttcactctgtcgcccacgctggagtgcagtggtgtgatcttggctcactgactgcaacctctgcctcccagattcaagtgattctcctgcctcagcctcctgagtagctgggattacaggcacgcaccaccatgcgcagctaatttttgtatttttactagaggcgggtttcactatgttggccaggctggtctcaaactcctgacctcaagcaatccacccacctcagcctcccaaagtgctgggattacaggcgtgagccatcccgccctgccagtcactactactttctagctatgcctttaggcaaacatttgttctctcaaagtcttaattgccagagctgttatatgagaatgattatttgttctaactcttaaggttgttgtagataaagagaaataatgaatgtaaagcactagtatagtgaatggtcctttataagctcccagtagatattaactgttactattatttgaggaacagattgcttctagcatttgaggtagacctttacgagtcctatctgggcattagaggcagggactgcagtcatttttgctaagttttcagaggttctgttggtgaaatgaaagagatcacaactgatatcagggtaacacctggaaacattaccatctccctaagatgtatgtacgttcgtgtctgtgagtagtggtcctgaaggaatgggaaagaaaaacagcaactcaaacctgaggtgacttctccagtttggtgtcagatgtccatgattgactcttcttctgcgactgtttctttggaggtcactttggggtgtatgtctttaggtctctttcacctttcggagcagaccgtaccacctgaagtcctgttgattatagagaatcatatgtatcacaattcttggggcaaaaaaaatgattcatgtctgagagatgatttaactttgggcctatttgggaaaccagcttcttaggtttagtgcaacatcttcttgtgctccttacccaggtcaggatgaggccaggctcccagaagtttgctgagaaattccatattggcatctcctgaccccatccagctccacatgggaggagaagtagattaaagattagctgtgtgggaatatggcctgttcctattacctgccacagaggagtccagctgtggtttgacagcatctgacactgtgtcagaaacacagcagccagctggaaaccgatcagcaccactctagttcctgccactcaccctacctaggttactctttgctgaaatgcttactgtgatatatttaaatacttatttataatttaatcatttatatatctgatacaaatgtgccgaatttgatatatacacagatccaaatcgtaaaatacacataccaaattatatataaaaatatgaaaattgacatatgcaatatatcaacatttgaatacaatgtgttttcgaaatgcagatcactttttctggttgtaaaaataatcatgcttgtacaaatgtcaagcaacatgagggactattaaggaaaaggggatcctaccctctggagggaaccagtaaggtttgcctttctgctgtcggaagttttaaaaacacttacaaatatgttacctgaataaaacgaaactactataaagtggttttgaccctagtaatatgtaataatcatgtcttgatattagaagatacagattttcctcatcctttttaactacttcatagttgacactaaatggcggtgccataattcatagtaggtagctatttatggatttattagagtaacttcagattgtcatcctctgataaaaaatactgatatgttgtattgatatgtttatgcccgtatccacttatccacattattttttaaaagtcttagaagtggctttccgaccgggtgtggtggctcgcacccgtaatgccagcactttgggaggccaaggtgggcagatcacctgaggtcaggagttcgagaccagcctggccaacatggtgaaaccccatctctactaaaaatacgaaacttacctggacatggtggcacctgcctgtaatcccagctacttgggaggctgaggcaggagaatcacttgaacttgggaggcggaggttgtagtgagccaagatcgcaccactacactccagcctgggcaaccgagtgagactttgtctcaaacaaaaacaaacaaacaaaaaaaaaacgtagatttcctaggttaacaagtatactcagttttaattttgaaaggctgttgttcatgtaattctcttaaccaagtacacaggtaatcagttgaccatattctcattaacacagggcatttttgttgttgttgttgtttaggagtcattattttatctcacaagtttcttgtgcttttatgatattctttctctttcctacatgtagtagccaaagtacttcatatacttcaactgtttgagttatgtaacagagtcagtaagaagcagaataaggaatgttaacctctaaacataccaagataattttttaaatgtgtttatttatttatttgagacaggatcttgctctgtctctgaggctagagtgcatttagtgcaatcataagtcactgcagcctcgaactcttgagctgagacaatccttccatctcaacctcctgagcagctaggacaggtgcatgccaccttgccctactaatttttagttttttgtagagacagggttcactatgttgtccaggttggtcttgaactcctggcctcaagcaatcctcccatctcagcctcccagtgtgctgggattacagacataagccaccacacccagccataaaaatgttagtaactattttaaagccccaaatcactatggtaatttacattcttgggctactatttactgacactgttttgctaaactgggattcaactgactgttgcaattatacagaggcagagttaaagctcagattttcaggtcatcagaaaaatagagattttcagagcatcgtcacatgtttctcatctcttatcttcctacctcttgatccatacctgagtgacctgactaccaaccagacagagttttaatctccctcaggtttcatggaaggtggtgtacagagtatctaaaattcatagataaccttcctattggtttatcttctcaacattaatgcagatgactagaaatcacacatgaaaaaaacccctttcccttgggtgatttaaagagtgtttatctttggtgcagactctcaactaaaattttttttggtagcatatatcaagaggttttcaagggttgaggagtataagcaggtaggttaccactcgatgaaaagtgattggtaatggaggaaagaccgtgaaactcatgtttgctctttactgatagccaaacccaaagagaattaatgtcacttctatatctgcttgaaatcaatattattaatttctagtatctcagaatttcaacttatagagtataactgtgtcaggcaccatatagattgatccaaggcacattcttttttttttttttagagacaggatctcactctgtcatccaggctggagtacagtgggactaatttttgtattttttgcagagacaagggttttccattttgcccaggcaggtcttgaactcctgggctcaagggatccacctgccttggcctcccaaagtgctaggattacaggtgtgagccaccactcctgaccccaaggcacattcttacagtgggaaagaatatcattacaagggttgctcaaaaaataagtttcctatgatgtttttaatttgccggtcaaggtttcagtatattttaagcaactttttcaattacagtaataaccagtattttggggtgtttattcgataagtggattattgtagcaactctcatgacagctgtaagaggtttattgtcagtgttgtctttattgtcagttgttgtcagagtttggggaattgagtctcaaggaggttaagttacttgcccaaagtcaaccagctaaccagagcccagaacccaaacctgaaggtctgcccaactcttaaagtccttgcacttgcctgtgaggttctgctgacttccgttgtcataggacagattgaaaatccatctagtatcaggtaggccttttagtatcctttggaaaaagttaaaattcagcatgattgctgtgctgcctcctttcctgaaatgttacaccctactctgatgtgctttattggccggaaatcttctttccataaactgcatcaagttggtgatgctttatgcaacagaaagagaaataatttaccataaacacagcaaatcattggataaatctatcttgatattttcacataatggtattctctacagtaataaaaatgaactactacttggacaaacatgggtgaatctcagatataacgacgagtgaaagaaggtgagacaagattctggtgtatgtttccattaatgcctatggaatatggggctatcaactggagggtcttaaggaagccttctagagttctggaaatttttgtcttcatctggctgaggttgcatgggtgtatacagatgtgaaaatgcatctgactatatacttaacatttgtgtagcttactggtttatgttacacctcaatgaaaaataaagataacaggcaaatcacaacacacatttcttctgggacctcaatgtctaatgggaagaccattttaaactaaggacttccacgttttagagttgtttcctaatgagacttcttataagtcacccagcttacaagtggatcagtgacctgacagtcttgaggagctaatgcacaggcaataattttaaaataattttaaaggttcacaggcaccaatttatatgtcaccatatctatacactaaaacacacatactacattcactagagagctcttcagggttctgtgtgtctttactttctatgacacttgcagaagaacgtgtaccctgagacttctgctttattagaacctggtgacccaattattattcaaacggaccatctttagtcatttatagagggttaaattatgtttaaggaggcaatgaagcatgcaatacattttacaaaggtttcatctgaaaatgtaagaataaagtttgagaatttaaaggggacttttcccagctagctcacaaactgcttgaattctgtatattgttctaccaacagaatcattgcactgtgccttatataaatgttgaacttcgcatatttaacattctaaaataactgtcacgtttctcagagcatgctcagtcttttaaattacatttgcagggataccaagatctgattaacacaacacttgtaaaaagctgtttctagatttttggagattttcctgtgatgtttacaggtatggttcatttactgtgccataaaacttgtgcagttttttatcattagaagcctccccggttggtaacaactatcaatctatcagtcattccacaaagatattttgaaggcttactgtggaagaggcactgggtttcctattgcagtatatcttcaaacaaaacaaaacttgtagtctggttaacatagtattaatactatatctactaatatcacaattacacaattcacagggttcgagcatctgactggcagaaaaatttcattttcttttgtctgtacttttgtttgtctaatagatatatttgcagtacaatacatcctagtataattgttggcacttattaggtgcttagtaaatatttgttgaatgtatgaattagtgggtgaattaatgaataggtggatggatgaagtttagcactgataattttaacagtaatgtttactgttcagtaatttcatcagtgaattcttgccatgtgcctggcatcgtgtgaagtattttatgtggattatctcattggtctctcctcagccctctgaggaaagtacagccctaagagggaagtattattaatatctccgttttccagactgaagaatctgaggcttaggacagttaagtaatttgtttgtgtaaaactggaattggcaaactttttctataaagggccaaagggccagattgtaatatttttgactttgcaggccatgagctctctgttccaattgcttgattgtggttttgtagcacaaaaacagccaccaacgatatgtaaatgagtggacctgactgtgttccaataaaactttatttacagatgcagtctgtgggtgggatttgccttggtggtcatagtgtgctggcccttgtcacacctcatccatgatagaagtgtaatttgaaccaaggcaacctgacttggaagaccttgtgtttaaccagttaagagcaaattctacacttgatcttagccaaaaggctgagaagtgttaggagcaaattctgatctagaaaaaggaaaaaggctagaaacttgctttagaagtcctcgttaataatgacgactattattttttaaattttatgttttttgcttttacctttccttcttaattccataccacttttcagtcatggattaaaagaaaataaaaagaaatctcaccacaatgtgataatcccctggtctgtatacagtggaaaaataatgcctgtgtcacaggcatcttttcattttacccctgcagaacaacccaggaggtgtgtgtcattgtccacttgcccagagtgattaaagtcacttacctcaggtcacacagccaagacttggatcacatcttttggacataaatcccagaactctttgaactctctagataccctgattaaagtcttcttttagcttcatcctccttaacgtcttttccctgcttcacctctttaatagctatctgcttttcttctaggaagcaaacatcttgttagcaccagctctgtattggcactaagatagagctgggaatacgaaacaaactaaataaagtgcaagccctgccctcagggagcttctggtccagtcaagcgatcagatttctaaacaggtaattacaatgaagggtaggaagtgcaggagagaggttgtgttacaggtgggtgtgagcatttctgacctgcttaaatttcagagactctccagcctggatttcctcagctgacgcaaccagttgggctgtaccctgagctttaggaattgacaaacagactggtgccaggaaggaactaacaagagtactgagttagcaaacatttggaatgggccagggaaggcctcccatgggagccacattgagcttagctctgatgactgagaacttgccctgcaaagagctgaggaatgagcggcctaatcagtgggaacaatgcgggcaaaggcctagaggcagtgaaatgctccgagtatttgaggaagaggaaggaggccctggagtcctgtagggaaccatggaaatcctggaagaatccagaggtcggctgggcccagatctgggagagcttttacgctggcatgggttgtgattagattttttttttttaatttttttatttttttatttattttgagacagagtcttgctttgtcacccaggctgcagtgcagtggcacagtcttggctcactgcaaactccacgtcctgggttcaagtaattctcctgcctcagcctctcgagtagctaggactacaggcatgggccaccacgcctggctaatttttttttttttttttttttgtattttagtagaggcggggtttcaccatgttggccaggatggtctcgatctcctgacctcgtgatctgcccaccttgggctcccaaagtgctggaattacaggcgtgagccaccgtgcccggccagatttatttttaaaagctcattctgactcagtggttctcatccctgcctgcacatcagaatcatcaagggagcttttcaacatccagatgcccaggccacaccctcaggtcaatcagaatagtgttttgtcattgttgtagtctacttttgtttttagttttttgggtttttttttaagctggttaaagatgattccagtgggcagccagggtaaaacaactactggtctatcaggcagagaaagaattggagggtacagcagagaaagcaggcaaaccagttaggtcaggcttctggaagtggtttaggtacaagatggtgttgatccaggatacggttagaccagaggaactgcagagaagtggtggtcatatttaagatgcatttaggaggtagaatcttccagaattttgggcgtcaagaaaggaagtgaatgggttaggaaaggggtggaatcaaaataattcctaggtttggggatttagtctgctggatggaaaaatgttaaaattgtattaaaataaaagattgaaggccaggtgcagtggctcacgcctgtaatcccagtgctttgggaggccgaggtgggtggatcacttgaggtcaggagttcgagaccagcctggccaacatggttaaaccccatccctactaaaaatacaaaaattagccaagaatggtggcatgcacctgtaattccagctactggggagcctgaggcaggagaatcgcttgaacccagaggtggaggttgtagtgagccgagatagtgccactgcactccagcctgggtgacagcaagactccatctcaaaaaaaaaaaaagaaaaagattggaagatgaaagattggggtgtgggtagacgattgtgattgactgaatttagttcaggactcaaaaatgattgacctgtctatagccagaagttggagtatttttggaactttgtgtgttcctggttgggtaccagcagggcatgcctgcttatttgggagaaagaatggcttatagctataggttttttttcacaagacagccagctctgtcgcccaggctggagtgcagtggccctatctcggctcactgcaagctgtgccccccgggttcatgccattctcctgcctcagcctcccgagtagctgggactacaggcgcccaccactagcctggctaattttttttttttttttgtatttttagtaaagacggggtttcaccatgttagccaggatgatctcgatctcctgacctcgtgatccacccgtctcggcctcccaaagtgctgggattacaggcgtgagccaccgcgcccagcctatagctacagcttttaaggatcttggatgtgttaggaactgtgctaaatactcacggatcttggatgtgttaggaactgtgctaaatactcatttaatcctcttaacaaccctatgaggtttttcaggggggtgatctcaacattacatatgaggaaattgaggcacaactagattgtaattcactttcccatgactatacagctgctaagtagaagagctgggttgtgaatcgggctctagcatcctggtttcagaaaccctgtacttaaccactacactagtcttaggtacccagcttgcagtttaaaatgagctcatcgtgttcacctacaggggatccatctgcacgttttctatggagttacttattcccaggttactgtcaatggcagttttcataagataagcctcttcctggctaaatgttacctacaccaccctctcccctactgggaccatttttttccatccaaactgctggaagaattgaaagatcctgagcacagttgcttaaataagtagactacatgctctatgaagaaatcatattattttctcagaggagagagagttggcccagtgaggaaatgattgctgggaacaaactttctggttttccattttgttctgctacaaatggcacgttctatcaatcaaggcctgccaggaaagattttgtctttcctcattgcaatttaattttaacctctgttgaactcaggtgcatgttaaatacaaagctgaactcttcagttagcattaatctatgtcctcctcgagatggggctggattttgtttagactgcctcttcccagaaaggaatttccctaatttgtggattttgagatgtttgtctacttaaataagctatctgtaaccccccaccctgaaaaaacatagctttactgagacccttaaatcaaatgctccgacagctttaacagtagctccctaaaaacagttttcactagtttgtctgtgaatgaagtacaatgtttaggtgagttagcaggtttatttcatagaggatgatgacaaggagcttaagtttctcttgtagtatcaggcagcaaaccccttccatgagcccatggtttggaatagggaatggcctgtgaggtattgcttaggagagtgaattgatacttaatctgcagagactacattatgagagcaatcattcagtgctccaagaaagcacagagtaaaactaccccctcttaaaagaaaaaaaagctttaggatatgtaattagtttacacttaattgctgtggatatgaaacagcagcacccacgccactgcataacactctgtgacttgttcagtggcacctttcacttaggttctgtgctgcaattaattggttttctatgtttgtttaaacataaaagctactgaaaattctatatcccagaattgattatcgatgtttatttgctccatttggggttcgctcattatttttgccaagttttcttggttggaacttggattttaaacaaactgcttcttttcaaactctagaaacggtgacatagcagctgaggtccatgaggggcaagaactcatctagaaggaggggaaatgccttttgatagctgatgcagcagtgtaaggaaaatggtgttgtgtgggttcattacagaagccagggcccccaacctgtcttgtgggagctagaactagatcatcagttctatgagggcagagcactgtgatttgttcaatgacgtattctattccgctactcagttcttggcatacggttatctactgatatggagcaaattactacaaactcagcagcttaaaataacacacatttatcatctcagtttctgtgtgtcctcagattcaaggtttctcacaaagctacaatcaaggtgtcaactgggactatgatctcatccgaaagttcaactggggaatgattcacttctaattttacttagattgctagcagaacccagttcctcaagggctatttgactgaggagcttagcttctctttagctgttggccaaaggctgctgtcacttccttttggcattatcatagctcactgtagccactaactcccaggctccagctatcctcccgtctcagcctctggggtagctaggactatagatgtgcaccaccaaacactggctaatgttttttatttttgacttcagacatgttttattataatcttatacagtctacataaatttgaacttgtatttatttgggttcagttataacatagcataataaaaatcaaagcactggtcctctgaaataaagcaggcaatcaccattcaataaacacacttgatttattttgtataaaagggttacgtttacaactaaaagtttaaacttttataaaaagtttatcatgaataagtacatcattacactttttaatgcagaaatagacatctctgccactatacaagaaaactctaattaaagagttaacaaggtttcacttaaatagatatatttatatataaatatatacacggcattcagtaggcttgtgtcaaaaaggtaatttctgaccaaaagacttcatttaagtgactgaatactggatccttctggtattgacactccacctttgaaaaaaggcaaagtctgcttagattgggcaattccttgtgattttaacgttttcgctccccatggtgggaatagtatatgaaaaaaaccttccaactgcagaaagggcatttaaaagtctttttcataaataacgaatatcacagtccaagtgagagaacaccctgggaagatgatcattcttagttttccttcccttttttttttctttttaaaaaggtccattcaacttgtcctccttgtgaaatggttgaaaaataagttcagcgcttaaaaggttctgtgaatttgttgttgtcgttgttgtgcaaagaaaaaaaagaagtcatgattattcagccacacagtgctttcctgtcatttgacattaactccgaagggaattcagaagcctgcaaggacaggatgctgatgtccgtgttgagggtggtcagcggcatcctggatgcctggttctgcccgggtctctggtgatgcaggctgacaatagtgggatgcaagtccagggtgatctgcaggtccaagatgtagtcgatgacgtgctgcaggatttccatcttgctcacattcttgttctgggggatgctgggcaccagctccttgagcttggagtagcagtcattcatgttttacagcaggctcatcaggtcatccaccggggttttgctctgggagatgcccaggcggtggtccaacaggctgtttttcctaatggacctcacgggactgaaggctttcatgctgaccgcgagggaaggtgagaccgggagggagctggctgtcctgaagctcaggccaccgctgccgcctgctgagctagctgcgcttggcaccggacttggctcagaatcacactggctaatttttaaaattcttttctagagatgttgtgttgcccaggctggtctcaaactcctggcctcaaatgatcctcctgcctcagcctcccaaagtgctgggattacaggcatgagccactgcgcatggccagaatctttcataacattgcttttgccttattctactgaataaaactaagccactagatctagcccaccctcaagggaaggtgattacataagggtctgaatacctggagtcaggggtctttgaaggatcatcttagagtgagcccatcacagtctgcagtagaattcagtacatattggttgaatcaatgagtttaaggagccagtgcttataatttgagctgagggcccctagctttgtccccctgtcacctttttatataactataaaggggtatttaaggtcatttacgtcattttaacattctacatatgatacctacatgatatttacatggtcttcccccgttcctaatactgcaaaatgataatcttacctactcctatggagggattctttttcaaaagaaggatcaacctggcaacctgtttgatccaatgtgccttgtctcttatatttttcatgctgcatgcatgatgggaatttaaagccatccccactcagtgttttctggatttcgagccttttgtaaatggagtgcccctgagtagctttttgcttccagggaatgaaaaaacaagggtgagagttcacatctaatgtgttttggttgaagtcacttgctacatgtgaaaacagtcggctctgccttctccactaagcctttgatattgttggggcttttcagtgtatggcgggattattaacaagggaaagtcaaagttgtccagcactgccacacagaatcaggagaaacttgtaggcaagtcactgaacctgaaataagctccttttgccccaggcttccccagatctcataccttttttttttttttttttaaattcaaacgtcatgacaatatctgtgtgaaacagtttgcaacgtagcttaagactctaggtcatgctttgcaaagctggaatttctgttttacctctccggttcaggagcagcctgcactttgagaagattggcaggggtgggacagacaggttctgggaccccggcttgaaatgctgtaaagcctttcccaaaaccttcttgtctctgaaacacagtgtattaaaaagacagaaggacaaaaatcaccatgcgggcccccacgggagtaccatttgccaggcaccccagccatcccacttcctccctctcttctgctctggctttgaaatggcgtgttgagagaatccaaagtttgatcctcatgaaaatgagaaattgcatgtattgacaatctgcaagactgctcctggcaaaatctgccattttgtacggatttgctaccagccttgctgtcaccctgcggggattggtttttccagtaatgcactcctccaagccaagtctgacaatgagatggtaaatactctggtgggttggggaggcaggggcaggaggccagagaatggtcagtttaagtagatcaaaagcacaaaattcatttcctcaagtggccttctctgaccatgaatctcaattctctggagatgaataacctgtgaattaactagtttccattaatattatgaattaacagtaagtaagccatgtccgtgctcaagctgcgtttgaagtggggagggtgaatcctattagcatttataattgtgttttgttttcatattaatcccttcccaaggctgaggaattaggagttttctcatttgccgatggaaaccagtcctaggagtctgtccctgtcaaatcctggaaaatagatgatgatacagggccataccttttgcttcagtcaggggcacttctgtgagaggcctcggtgacattttgcttatctgttagattaggcttaatgtatgatcctggaatttagtagttgcatttaaagcaattctctagaccaggaatccacacttggttactcatctttatcgggatttcatgaaaagtcctacaggtttacagagctcctttttcctttgccattcatcactctcaattgtgtctctgtattcctctccgacttatttcatggcagtttgggatgccacatgtgccaacatctctgattctgctttttgtaatatcacattgcagcagtgataagagacactagaaaatgatgttggaatgtcaaaagggaaaaactacatttctatatcagaaactaagaccattggctatacaagaaggaaggtaatatttgtgaagactaaaaagaaaagtcaggaaaagaaaattgttttcaatatagctcagtggttagtggtttcatgctaaaattgtcttcttgaacatggccacatttcctaaattattgccaagtgtttaacttattaataaaggaagccaggcagtgatctctttctgggtaagggctaaccaaaatgcaaggatgcaaaataaccacattataaatgctttctgacagcaacgtgaaccaaaatctagttagtggtcactaggatgttgaagtcagaatgaaagaagctacagcatccttgccacgtggctctttaggtaagagccacggaaggaggggagattcagatgtgaaatcaaacatcctgagaagtgcttgcccttgtcctcatacagcaaattagcttctgaatacacagttacctgctaactgctggggtgggtgaatcctcttctctgcaattctggaaggccatgtggagtctctggtcctgccctttgtcactttcctctgcagccatggttaacggtatagccattcaccctcagcatgcataaatccttttttcccacaagaggatatcggctggatgtgatgtttatggaactaaaggagcagctggcggtgtcggattcaaggcaagtaggttgtcttgaccatcctatttagcagatggccaggacttgatagagcaaaaattattaggatccaagtcaagggccaaatggcatgggggacagtagaagtaaatggcagcacatatctgaacgcaggcacatgtcgtctgatggggtctctgtgcttccttttcattttacttcaagcaagagtaaacacaggccctcctgtagagcctccaggtaaacatatctctagagattattgatagcttggctactaatttgataattgtgtggatccttatggtgggctattaattgaaaagaaaatgttacgaagtttagatttcatgagcgtttatgtgaatttggccttcagtccgaacctaggtttcatggtttttctgtattgtcagtatctctatatactttggttgtatctaaagacaactgaaaagctttaattcagagccctttttcgagtttgtgtgccatctttttgaagatgactaatgccacgaaagctgctctgaagtggaagtgccaggagcgaagttttgcaatgagagtacgaactctgcagggaaagggggtgtctgtttcttctagtccattttaagctcatttgtgcaattgctgccttctccgtattactgcataactcctttgatcttaaagtggaaggaagcaaatttcaagagccaggatcacttctcatgtggctttaaaaggaacagcatattacaaaattgagtggatgtcaagtaaaacataaatttggatcttttgaaatttgaactcagggagatattactttcagagccaagcacattgacaagctcagggataaattgcatttgtttgtcattcatttaaattcaagtgttaggtcaacttgttgcccggtgttattgtcctttattggatgtggcatttgtactcagcattatactctaaactttaaacgtttaatcctcatgacaacattatgagactgtatccccatttcacagacaaggacactaaagctgaaagcatccatacctgactcagaattccatattttccccatccctggcctcctgcatcctagatggagaataaaatgtaaacacaggttgctaatacagccctcttcactgttgtcatatttaaaagctgccaaaattgcttagcttatgcccatgaatttttttttaagtggcaaattgattgaaacagtgagtgaaagggattatttcagttagggttatgcctgactggaacaaatccacttattagcatgctctttggattccccaccctgacttttggaaccaagacatagaccagagaatgagctcagtattattagtaagttactttgaccagccaataatctccattttctctccttttctcctcattcatcttctcaaccccagccatattaaccaccagtgaagacgatgggagctgaatggatgttgtagaaggctttgcatttgtgcagttgtttagaatctggggtcacgttcctgagctcagatgaggtgaagtctgagtatcagacatggagaagctgtaatcagaagtgaccaaaaattgaacctgggctaggttgactggttgttttccttttgcatagcctacaaatattattggtgtgtatcagtcatggaagattagaaacactttctttgagccttcacattatcagataatactaaatgcattaaaaagttcctgtcgtagtcttttttgtgctgctgtcacagaatgccacactgggtaatttataatgaacagaaatgtatttggttaacggttctggaggctgagaagtccaagagaatggccctgacatctggcaaggctttcttgctgcattgtaaccatggcaacgcgtatcacatgaacaagagagagaatgtgagagagcaagagggggttgcaagggggccaaactcacttttataacaaattccctctagcaataatgatgataatctattcatgagggcagaaccctcatgacctagtcacttcttaaaggtcctacttctcaacactgttgcactgggaattaagtttccaacacgtgaaatgttggggatacattcaaaccatagtggtccccctgactataaaatattccctctcattcaggatccaagatcagagtatctgagaaacattgccatggtagagaagggataacacctttttggaggagcacatgagttgatcaggtggccagcaaatgttgtgtcttgtgatgtggaatattactgggaaacttttaagacaaaccgtaagccagatatattgtttcaaaaaactactggtatcatagcctgtttctcattttttacctttgcatacaactcatggaaactaatggctaaattttgctgtgtaccaaatgattccagttagttaaaacagatcgttttatgggtcagtaggttggctggtcagttgtgggtatggctagttcagcccatctctgtggactgcagatggttccactgaggctggatggtctcaaatggactcactcacctgtctggtgatggcaggccagtgagtctagaagaacgttagctaggactacctatgtctactccttgtagtcgctcatcctttaataggctaacttggaattcttcatttgatcttaggattccaaagaatctgagtgttttatgagcttgtgtctgcatcatgttcactaattctccattcactaaagcaagacatatggacaagcccaatttcaaagaatggaataattggtgtacactttccatagaggagggcaaagtcaagttgtaaaggcacatgtaacagggatagagggaatttgtggccattttgtcatttctcacagatattagagtaactaactacagatagttaagctggcatccccaccagaatgaatcaaagggaccatctttttgtctatagcttcaatttggtatggaatcattctctgggatccttattttattctattctggcctcttgaaacttggccacttttactggttaggttctcttctcttgcattcctgagctgtaattccatttttgaccaggttttaaaattttgatcaattacttgctaaggtacaaatacgatgtttcttctaatgcaattttgatttggtgtattctgtgcagttacctttcaagaatgtttcacgcttcagtccctggcttgagcttcttctcaggcaatttgtaggcacacttatgccaactcccagaattccacctttatggtctgatacactgggttcctattcactgattttttttttttatctgtaatgtttacaatgtagtagcaaattccacatattttattagtctataaacataatcctgtgtttagtagcacctgtattctgaatttacgctctagacattaagatataatcactattaactcatagagcatctaatgagggcttctgaccctcaacctctgcaccactgacatcttagccagaaaagatattgtagagagctattctgagcattataggatgtttagcagcagctctggcctctaccttgatgtcagtagcccctccccttctcatccccctcccactgctatgtgacaacgaaaaacgtctccagacatggtcacatgtccctcttgtagggcaatatctcccccatttgagaaccactgctctcttctggagatgctgaggcttaggagagatggaagtgtgtgcagtgtgtgttattgtcagagaggacacactaggaacagcaacccaacagggaaaatttgtaagagtaaaaaggaatgtggaaaattttcagtcaccttaaaattaattctaggggtggctcttgattcctctgaattgacctgaaaacatcaaattggattgtgctacacagtgaaaggttcatcaatatctcaacttcattatgtgagaagtggattagatataaatactatcaatgggggatgggggaagcaggagctatgctggccgtagataatagatttttgaaaaactctttattttggaaaaacttaaatatacataaaagtaaagaaaattgtataatgacccatcctatacccaccacccaaggtcataaatgattgattcaagctaatcctgtggcatgtataccccgctcactccccctgctgttcactcttggattattttgaaacaaattcaagacgtcatttcatgtcatttgtaaatatctctgtatgtctaaaagaaaatacttgaaagccaaaattgtaatatgctgctagaattttaatcttctagaatgggcaagaatgaggagttctgctgagtagtatcagaaagttaagggaaagaagaggtgggaagaagactgaagaggcttgacttttgagggggattaaaaaccccaggaggaaatgaaggtgggagacactgtctcttcaagcttctctcccctcctcttctgctttccataacttttagaatatgtgctttttcacaggggactgggatccttacgaaggagaataggctggcagaaaacagattcattttctaaaaagaagggaaaaacacagtcaccagaagatgttgaaattttccgtcaatgatggattgctctctcatgactttcaatgactttttagccgattgggcctacttttaataaaacaaggcaagaagaaaatcttgcagttgctttttaagattttgctaggactatagtatttctctcctgttacaatgtattctgagaagtttctttcttttgatttaaacttcctcacttgattttatgatgtcataaatctcctgcatttggtgagagccatggtgtatgtgagacctaagcagcttgctagataacattctattctcccccttctctttagaagattaaactgagactgttgtgcctgatgccagaatagatttaaccaatcatgtttcctttacatttaggtcagtccgagggacaattctgcactggatcctattatccacgggttgaagggtgtcgtacatcatggtaagtatgccacatacacttccttttgctgggatgtgaagggctcagatctctacctaaaagaatcaggttatcttgcagaggacagagggtgacacctattcctcatcccctgatgttgaagggcattagagccattatatgatgggtaaagagcatgcccatttattacctgcaaatgggtctgtgttaacagtaagcagtttgtttcttttcaggtactagtttgaatgcatatgttataaatcagaacaccttaagatgtactattcttatgtgttgaacttgccatttgtttcatatctctcctaaaaatattctttcagttgtcttttcacctataaatgtttggtttgcatcacagatctagggcagcattttaagtagccagacaagttattaaactttgcagcatgtgaacaagcgtcatgcagctactagaatggaaaaggccaggctgctgttctgtgctgcagatctcttatcctcaggcataaaaccgggagagaaagtaagataaatgggttctgtcttttccaactggtttttattggaagaatttccctgcaactgtattatctgcactgcatcattacctatgacatcaagatcctctaatttcaaaagtacccttgtcgcagtgaggtgtgtagtcgagatgtaatgtaatgatttgcaaagttttaataatctaattagaattccagagacgttgacagaaatagcattagtaaccataataaatctccccttcatctccacagctgtgataaaacatcttcacacctttttgagaggattgtctttagacattagccaactccatagagcttaacaaacatcttccccctctctttccgtgaaactaaaaccagttgtcaggggtcaattggagcaagtaggattttggattaattgttccgttctcaaaattggtcagtcatgcagcaggtaacaatagtaaacctactcagtgtagaaaaatagggttactgaaaacaccacatagaggctttcattttaagatatttctgggccaggcatggtggcttatgcctgtaatcccagcactttgggaggccgaagtgggtggatcacctgaagtcgagagtttgagaccagcctggccaacatggtgagactctgtctctactaaatacaaaaattagctgagcatagtgataggcgcctataatcccagctactcgagaggctgaggcaggagaatcacttgaatccgggaggcggaggttgcagtgagccaaaattgcaccattgcactccagcctggacaacagagagagattctgtctcaaaaaaaaaaagatatatatttccattgtttcttcccagttctcagtttctggaagggtactagccccattcttcagggctcttacctcccaaagactccacctcatgtcataaacttggggattagcatttcaacataggaatttgcttaggggacacaaaccttcaggcgacagcagaggctgctacatatggaaaaacgatatctggctctgggagggttgccaagatgcccggggtgtggtttcaaccctaccctctaagtgggaagtcagatgagacctgcaaaatacactgacctacaaaggaagttcacttattcattcagcagaaatatatttcatgcccacgctgtgcaaagccaggtttggaacactgattaagacacacacaggccagctctcatggacctagaagggaagtgaagtgctgccttcctctcccgccagtctgcctggtatgcagcccctcccagcttgtgcatttgctgtttcctctgtcgggagagttcttccttcgcttgtgccaagggtgtctccttcttatgccttcaggtctcagctcttatcttgcctccttagaaagttgtttcttaagtatcctatcaaattattcatcccaccctactcccatcactctctgttacaccatcccaggtttctttcttcaaagcacttaaatgtatctgaaataactgtgtttgtgtttttggtcatatatcagcttcttgggtatcagtttcctgagggcagaaaaccatgttgatgtggcacgctgtgtccagcaaatagtaggtactcagtatgttagtcaaatgactgaatcaagtaagcatacaaataaataagtgaaaattttcaaaatatgaaatgggatgaagggaaggaggaactaaagcccatgtgggtattgccttgattgagaagaaaaaggagtaggagtatgtcgttcttccaaaagggaatggaggacattagaaatagttttttaaaaaaaacttttgttggaggccaggggcagtggctcatgcctataatcccagaactttgggaggctgaggtgggtgaatcacttgagcccaggagtttgagaccagcctgggcaacatggcaaaaccttgtctctacaaaaaaatacaaaaattaactaggcgtgatggtacatgcctgcagtcccagctacttgggaggctgaggtgggaggatcacctgagcccaggagatcgaggctgtagtgagccatgatcatgccagcctccagcctgggtgacagagtgagattctgtctcaaaaaaaaaaaaaaaagaaataaaaataaaaaagcttttgttggaactagaagcatttcagttgaaagtcctgtgagggatttgaatgatctattaatttgaaggaacataaataatcatgtccttcacagtctctggcttgggaacaatgacagagatgtgtaaagagaaaaatcaatatggatttctgttgcagttcagaaatgacttttatttcttcagctctgggaatcatatattagaatgttaatttctcattaatttttttttaaacaagaagcatcttaaatgtttcttcagctgaaatgtgaaggaataacctgctcatatcagccaactgtatttggcagttggtcattagggtcctctcttaagcagacgccaaggtggaatttgaagtgcaagaaagatttttggcagggagggtctgcctgggaaggatcaaatggagaaggaccaggggttggtggggagagcgtttgggccacgcatagtgcaggtctgacacctctgcaaggagagaggtgagctaggaggattggctgaaggcagctgtaaggaagtctttgccaagctgtcagagagccccagagcaaagactgcccctgaaaggagtcctgtgttggcaggaatggcccagctcttgttccccaccatgtgttgtcattggctggagcgtcccagcaagaatagcctgattgtagacgctgggcagatcctggaggtgcagctgctgcaggctgtcagttcaacaagctcctcacagcagcttgtctctgaaagggggatctcaggggtgcacgcttaagagtggcacagagcttcacgtccccttccagaggcaccttcctaatcacactcccgtagtgctcagagattcttacaaacagtcctggctcattctgtccgtagttactgagtgcctaatctcagtacaccatgaagctaggcattgagacatggacctgccctcaccatgtatgcatatgcttggtagagatgtacaattaagtatgtaatgacattaaagtgtgggaagcagcacacttaactcaaactttggtgattggaggtggctcaaaccaagtgaacattaagacccaaagagtgcatagagattatccagacagagaagggatgcaggcaggaccagtatagatgaaggtgtctgttggtaagagaggatgtggagaatggtgagaatgtggagaatggatgaccagctcagtggttggactgagaagaagctccaaagcatttcccagtgctttgaggcttggagaatggtgactgatacggtttggctgtgtcccacctaaatctcatcttgaattcccacgtgttgtgggagggacccagtgggaggtaattgaatcatgggggcaggtctttcctctgctgttcttgtgatagtgaataagtctcacaagatctgatagttttaaaaaggggagtttccctgcacaagctgtcttctcttgtctgccgccatgtgagacatgcctttcaccttccaccatgattatgaggcctccccagtcacgtggaactgtgagtccattaaatctctttcttttgtaaactgcccagtcttgggcatgtctttatgtgcagcgtgaaaacagactaatacagtaacattgcttctctattgcttttctagggagagacaccctagaaacctcttgaccacataaagtgctgtgtcttacatgttcatttgtctaggcaaattgtgacttttactaactcaaaagccatgaggaaatataaatagaatggagtgaggtgatttgccattgattctggtcccatctatctactcatgcagtgatagatggaagcactaaaaggtatctaatcaagtattttatttgccctattatcaacatccactggagaagaaagacttaggggaaaattgtaaatcctattcactgtattggttcagtcattaccagcactttttgtatacaagaaccagcagttgcaagtggccatttctgatgaaaatactggttgctaaaacttagtctagttctgatgtgtttaaaatccattttttaaaaaaaaaatcctgtttgtgaatcggtgtaaaaatatagtctttccttctaagtgagaggcaagaggtcaggtgaatatggcagatgaggcaaaactctgcagcccaatttgttcaacttttgaagccttaggttgtgcagcatgtggtcaggcgtggtcatggagaagaattgggccctttctgtcgaccagtgctggctgcaggtgttgcaggtttcagtggatgtcatcgatttcctgagcatacttctcagttgtcatgggttcgccaggattcagaaagctgtagtggatcagaccggcagcagagaccaccgtgatctttttttggtgcaagtttggctttgggaagtgctttggagcttcttctcagtccaaccactgagctggtcatcactcgttgtcatataaaatccactcttcgtcgcatgtcacagtctgatcgagaaacgattcattgttgttgcatagaataagagaagaccacacctcaaaacagcaattttaaaaaaatttttgctcaactcatgaggcatccacttatcgagcttttttactgttccaatttgcttcaaatgtcgaactactgtagaatggttatcgctgagttctttggcaacttctcatatagttgtaagaggatcagcttcaatgattgctctcaattggtcattgtcaacttatgcttctcatcttcaaggctctcttctcttttgcagaacttcttagaccactgctgcactgtatgttcattagcagttcctgggccaaatgcattgttgatgttgtgagttatatctgccgttttacaacccattttggactcaaataagaaaattgcttgaatttgctttttgtctaacatcatttccatagtctaaaataaatataaaataaacagcaagtactaagtcattagcaaaaacacaaagtgagaaatgtgcattaaaatgatgtgtaacataaccatatttattgaagaatgcattcccacatcattgttgcaaatatgaacagtgcaaaaactgcagttccttttgcaccaacctatttgcatcaacaattttacctaactggtccatgttaagaaatgtgtgtgggccgggtgcagtggctcatgcctataatgtcagcactttgggaggccaaggcaggtggatcaccttaggtcaggagttggagaccagcctggccaacatggtgaatctccatctctactaaaaatacaacaattagccagacatggtggcacgcatctgtaatcccagctacttgggaggctgaggcaggagaatcacttgaatccgggaggcagaatttacagttagctgaggctgcgccattgtactccagcctcagtgacaagggcaaagctccaaaaaaaaaaaaaaaaaaaaaagaaagacgaaatacatgtgcattatacgtcgcttctcgtcctttcggctaagatcgagtatgtgtgcgttatgtcctgtgtcagttaagaggtgtgtgttttttcttttcatgttgttggaatacataatttgtcttcctttttatagtgctcactccaggaaaatccagcaggctgtttgtgtacatacacatatactgtgaaaagacttcaaaacaccatcctcttgtgtcagtcgtctaaaacggaccacttttgtattcctgataggaaacttgcctgtggtgattgcttggtattttatcattgtctgcttgtcctcttttcccaccccttcctcactgtcactttcctctcctggagaatgtaccatcttagtgaggtgtaataggtttctttttctttcagaggaaatgtgagggggacagtcagaaattgccacagacagctgggtacagtggctcacacttgtaatcccagcactttgggaggctgaggtgggtggatcacctgaggtcaggagttcgagaccagcctggtcaacatgttgaaaccccatctctactacaaaaattaaccaggcttggtggcgggcacctgtaatcttagctactcgggaggctgaggcaggagaatcgcttgaacctgagaggcgaagtttccagggaactgagatcgccccactgcactccagcctgggagacagagggagactctgtccccccttcccccagaaaaaagccaaaaagaaagaaattgccacagacataatgaaatcttctgctggtcagagctagacggctgctctctctcggtcttcccttccctggctcttccaagaaagctatcagtgaaaggacaaataagttatcacctgagaactcgcttctattagtgtcacaaaatgaggctcttgcaagcttttcttgtcgaaacacggcactggcagttgtggctatgacaagatcaaaacttttctagcagaccagctttctcatgtgactagtttgttcacttggctcacatttggggtctccctccacctttttgcccctgccctgggacacccatcatctcctcaccaaatctatggacaaagccctagaatagctagagtcactccaggcctctagcaaaaaaggaagaaataacagtgaatttgcaaatatgcattgactgccctgccaagcatttccagagagtggagaaagctatctgagaaactccacatcattcatctttccgtattccacctgctgggactgaagtttctacaataaagagtaacggagtgtcatctccaggtcagtcctctgaattccttctagaacagtgggtagacttcatcttacacaattgctgttgcatcaccagccacacattcactgtttaaaaagaaaccggccccaggatatggtgctgcctgcactgttcccctgccggggatgcacttggttcagccccttaagaagaccatgtgcctatttctgctgacgttacacatgcaccccgccctctgagccagaaataccacacttaagtatatccccaagaaaaatattgacaaaagacttgtgcatatgagccttattcataatagccacaaactgaaaacagcctaaatgtccatcagtgggaacacagatatagaagttatagactgttcatacaatggaatattatgctgcacttacaaataatgaactatatagatttacacaaaagcaaaacagtgggtaatgcatgattccatttatgtaaagtgtgagaacaggtccatccacaaaattaatccatagtgatgaaagtcagaacagtggggaggaggggccgggtgcaatggttcatgcctgtaatcccagcactttgggaggccgaggtgggcagatcacctgaggtcaggatttcaagaccagcctgaccaacatggtgaaaccccttctctactaaaaatacaaaaattagccaggcatggtgttatgcgcctgtagtcccagctactcaggagactgaggcaggagaatcacttgaacccgggaggtggaggttgcagtgagccgagattaagccactgcactccagcttgggtgacagagtgagatgagactcggtctcaaaaaaaaaaaaaaaaaaaaaaagagtggggtggaggaatatattgagtgaaaaggaacctgaggaaattttcttgggtaataaaaatctttctctatcttgatctagaggatgattgcccaggtataatataaaaatttccatgctgtccccttagatttctgcatttgagtgtttgaaaattaaagaatagctcatatatattacacattaatttcccaaatatattgcttccacaaagcttaaaaaaattagcagcacataccaaatagtcaaatattaaaaatcttgacagtgtcaagtgttggcaaggatatgaatgcaggaactctcatgttgttggtaaggagataactgatatgatcactctttagaaaatagtttggcagtatctagtaaaatgaatctaagagattccatttctatgtctgtcccctagagaaactcatatatgtgtaccaagagatgtataggccaggcgcggtggctcatggctgtgagcaactttggagccgaggcaggtagatcacttgagcccaggagtttgagaccagcctcagcaacatggtgttttatctctacaaaaaagtaaacaaaattagcctggcatggtggcacccacctgtagtcccagctattttggggagctgaggtgggaggatcgcttgagcccaggaggcagaggtttagtgagccaagattgtgccactgcactccagtctgggtgacagagcgagacctggtcttaacaaaaaagaagacatgtggctggccgcagtggctcacgcctgtaaccccaacattgtggggggacgaggctggtggatcccttcaggtcaggagttcgagaccagcctggctaatgtggcaaaaccctgtctctactaaaaaaaaaaaaaatacaaaaattagctgggtctggtggtgcgtgcctataatcccagctacttgggaggctgaggcatgagaatcacttgaacccaggaggttgaggctgcagtgagtcaagactgcactccagcctgggtgacagggcaaaactgtctcaaaaaaaaagaagacatgtgggcaagaatgtttgtggtggtgattttcctaattacccaaacctagaaatgcctcaggtgcccatcattagcaggctggataaagacgtagtggtgcagtcatagaatagaacatttcaccacgatgggaaagaatggcccactcaacaatatgagtgcatccgagattggtaaagttaagcaaggcaggctgaatgagaactggcctcaaattcaaacctaatctaaaaggaatcacctttgaagtctttttacgtcttagcaagcttctgaagaaaacattgtgcattcccaaagataaacttcaaaacatgagaaaacccaatctttattgcttaggagtttatatgtgggtggtaaaacttaaaaggaaacccaagtgattatttcaaaatgaggatggtggtgacttcttgggggtggatgagagagtgacaaggggctggctggccgggtaggggaaggcaaggtcttctcgtgttctgagtgttggtcacacacccacacaccagagctcacttcaggatcatttttcaacagtaccttgatgttttgcacgcctttctgcatgggtgttatatttcacaatcaaagaagacaatgattaacattagaaaggaagagattcagacattgctttcctctgggacacatcaagttccaagtggcctcacaacaaccaaaggggagtgacagcactttttaaaaactttcttaccataactacccctgacaggctgtgtgttctctccacaaattgattgcagtccaatgaaagaactctgcctgccttggaattgtatcattaagaggtaactctgagagcaaatatctccttgtagagattagaaacaggaatcagaaacaaaggggatgggttgtcaagtgacaggtttaaacacaaagggcgcctcactgctgctgtgctggggcatgcttgctctgtctgattagcccagcagggatcactgcatattccagaaaccctctgagatacaaccaccatggcccgcatcatatagaaaggcaagcaaagcagtcagaggcggggcgacttgccccagcgtcacatcatgagaagtgacccagcccagagtctaaccaaggtcttcctgacttcagactggctcttctgactccaggtcctctcccgctcagatccctgccaggctccccacctacctttttccatcttgattgaagctcatcatatgggttttgttgaaggggcaagtgaagacatattgaacaggaccataatctgtcactgtcaccctgacaccattgtgactatccttgtggtccaaaagctcgaaataagccatctgaggccaaatggctgaagtttctgaaaatatcttttgtggactttggaagaagaggacaaattctagaacaagcgacttttgggaaaaatgaatcctgaggcagaaatgtcattataatccagcagcaagaaaatggagcagagctgagttgctgtgaggggttcttgcctgtttttgtgtgtgtgaactgccaagctccctgaatcagagtccacacatccttccatcaactgactgcctaaggtgctgagggtaaaatgaacaatatttctcttgtccttggaaaaattttagtctcatgaagaatcttttttttttttttttaatttttttgcccttgactttcttagcgtaaagactaatgttacttgcatgcaaagtaatctcacgttgaacctttggaatgagctttattaaaagtctccattatggaatacttttaaagaaacagaattttgttatttttcacttgaagttggactcttaggaacacaactgaatgaggtttctagagcagtacttcaaagttcaggctggcctgggtttgaattctggctctccagtttgggagctgtgtgaccccagtacaaattactgaacctctctgtccctgactttctgccttgtaaaattaggataatgaaagtgcttatctcacgagtatcatcgctaaatgcattaagacagggaaaacacagagaaaagaaggcgtgcctggtatgtgttcagtgccctctaaatcagtggtcagcaaactataatctgcagaccaaatccagcccactgcttgcttttgtaaataaagtttcattggaacacagctgcactcacttgtttacatatcatctatggctacttttgcacaacaatggcaaacttgagtagccgtgacagacgcactggcctgcaccaccttatgtgtttaatctctggccctttaaagaaaaagtttgtcaatcctacctcatctaaacggtagctattgtagtagctctactaatagtgttgcctgcacccagtaatttgtttatgttggggcaatgtaaatactcactcaggtcattacttaccatttgctaggctttacagagataggtttcagttttcattttgccaagatcatcacatgtttcaactgaattaatgagggttctgttttaatgtttaacttaaagaaatcctccaaattattttctcccttttgaacaggaaaaccaatgctgtattatctatagctcactgataattttgaacatctcaacatgcaacaaagtttcccgtttgaagtttgtgtttccagcatttaattacatggaactttcctgaaatgtgctataaatatgcagcaccctgatcttggctaattggctcacatctattaaggatccaggaaggactgatgcttatcagaacacgtttgatctcaaaatcttctagaaacaggcacacttaagccatttccaccatttcctggatttcagtgcatcagaaccaccaccatagatgtgagctatttccacttcttttcttagccaggaaatgggatgctgtgcgacttctattttatcactaatagtattgttaacaataatgttaagacgtaaaaagacttcaaaagtgattccttttagattaggtttgaatttgaggccagttctcattcagcctgccttgtttgtcaatattttatcgtttgaacaggattatgggaacccagggaaatgccgttttcctgcttgtttcagtgggatgtgaagagcaaagagagctcttaaaaaaatacctccatttgcctactgcaaaagtgcctgctaaagtgcttgggactaccgtgtgtgattttcttaacctgctcgcctgctctatgtatgtcacctcggtataggagagacagacactattgcgtagtgggtttgaaatccagttctgcctttgactagtcgtacaacctgaacaaaccacttcacctctttgtggctcagttttctcaactgcatcgtgaggtaatactaataccagtcttgctggtttatcctgaggattcagtgacttactgtacataactgtgcctggcatgtggtaagcactcagtgatagctgtcaccactgccaccaacccccactgcccatcatcatcattattgttacttgtggacttgaatatggaaaccacgtgatgacaggaaatgactgcagagttctgggtactgccaccatcactgcccatgtagtaaaatggaatgcatgttgctcaacttaattcgtccatacaaaaataaaatgaaatgatgaagatgatgatgatgatgatgatgatgacgaagatgatttgggtagccagtttcttttgagatcaggggaaagggtagtggacaaagaaccaggaagtgggtgaaaggaagaagcagcagcctctctgcttctgcaactgttaacctctgtctgtgcacctaaccctacctggatgttctataaatacaatcttattgaatcccatcagcaacacgttgaggtaagaattcttaatcccattttataaataggtaaagtgaggttttagagagatgagcgaatgtatcccagccatgcagtggaacagtgatttgaacccagttgtattggactctgaatcacatttctttgtgctctgctgggccagcttctaagtcccagcatcgactaactttctgataactgtcaaaagcacttaactcttgtatatcttggttttcctttgtgaattaggtcattgactgagcatcaaaaggaagctaaaagaatgtacacgtcgtgtcagttatggccaccagaaccctgtaggggagaaaggcaatcaatgaaactgttcagtgataatattgggtttttgtcactgtatgactctatataatttaaatgtcatgttcatttccttaattgttgacaagactgctatctttatgtgctttctctttggaaatattaatgtcaacatacatttcatttaaacatcaacccttaaatcaaaatgccatccttggtcagctgaaacctctaataaagttggaggaggctagatgtcttagatgtctttgaaccctgtggggtggctattcatgaccttggattgctcttctccaggtgcttcaagacagggatctgattaataaggtggactgtctccctcccaggccacctgcttcagaccccacagcactagttattcatgccatagtatgggccccgggattttctctggactgtgcctgtaaggaaggccatgaggcatgcatttaatcctctgcctgctgatggagagtgtttcacaggcaaaagtaaattccatacctccatcactgcatggagttggccctattcatgctcatatgtattgcctgttgcttttaaaaaaaaaaaaaaatacgccgccctcatataggagtgcaggggttggcaaaatttctctgtaaggtgactgatagcaaatattttaagctctgtcagccatatattctctgttgcaactactcaactctgcagtggtagcctgaaagcatccgtagacaatgcataaacaaatgagctgtgtaccaacagaacttcatttacaaaagtaggcactaggccagatttggcccatgtaccatagtttgcccacttttgacttagagatatgtcgtgagttagtttggtcaatttcttttagccatgtatgaaagacctactttataaagtgctacgttgggtgctggggataaggtcaggaggcatggtcttgctgtaacagagcctacaacctgtcaaagagaccatgttagccaattacgcagactgaaacccaggtcttaacaacctatgaccttgggtaagttctcagccctcactaggatgttgattcctacttcatagggttatgaagcttcacttagagaaaggccacagcagggcctggcacccagtttctgaaccgtaagtgtgaactgggaaaaggaggcaaactgaagcaaatcccacagtgtggaatggagtcttggggtgcaggtcagtgaagggtaaactgaggctagagaacccagtcactgtaaacagatgagagtcaatgctgctgctgcctggccctatgcacatcctttactgtggtcacataaaacaacaagctctagacctggcttctactagactcagaaagttgacggggccctttgctgtgagtcctactgaataatgtcagtatcttagttaatcaattctgcgactctcatgtcttcatattttagcaactctaaaattgggatgcatctttgagttcatatcaagtcattgtttaattagcaacatgtttcctttattagtggtattggaataatgatgcatctcacgattgatgttgacttggagatgaggaaaacagtatctgggacttgtttgttatttaaaatataccaatagctactgtgcttgtttgtttcttcattctcttttcacataattattaggcacctactgtgttctggggaagtgttttagctgctggatatatgtacaggcaaggtcttcgctcttgtggaataatcaagctgttgtggcagacagtaaacaaaggaatgctggaaaggaaatgaaggtgtgatgcagaaagttaataacaagctgggcgtggtggctcacgcctgtaatcctaacactttgggaggctgagccaggcggcaggagttcaagaccagcctggctaacatggtgaaaccccgtctctactaaaaatacaaaaaaattagccaggcatggtggtgcacgcctgtagttcaagctactcgggaggctgaggcaagataatcacttcaacccgggaggtggaggttgcagtgagccgagatcgtgccactgcactccagcctgggtgacagaacaagactctatctcaaaaataaataaataacagagaaaacatactgagatggggggctcaggcggtgacatttgagctcagacatgaaggatgaaaaggcatcatctctatggagggtggtgggaggggaagcattccaggcagagggaacagcaaggtgaggaggcaggtaggtggtcagcaagggagagagaggaaaatacaggctgcagtggtagacaggtcatgtcgggccccatggccaccataaggagtctggattttattctaaatgaaccaagaagccactggaagattttaagctggccagtgtcaggattagttttacatttaaaaagctaaaagaggctgggcgtgggtgcccacgactataatcctagcactttgggaggccgaggcagacagattgcctgaggtgactcaggagtttgagaccagcctgggcaacatggtgaaaccctgtctctactaaaaatacaaaaaattagttgggcgtggtggcgtgcctgtagtcccagctactcgggaggctgaggcagacgatcacttgaactcagaaggtggaggtggcagtgagctgaggtcacgccactgcactgcagcctgggggacagagcgagactccgtctccacaaaataaataaataaataaataaatagctaaaatagttgcctagtcttcagtgagatttcctcacctgatcctgcagatgaggaccccagagcccagggatccagaatgagggtggtagaaagatgggcataaggagagctagatcccttcccatgtcacacacagtgcagttgtggtccagcctctttccttgtaaaccttgttttcctctcatatataagacaaaaaactagtgtctttgagacctcgatttccccatcacccaatcataacttcagtcttgtgcctgttccttaaaatcatttactgtgaagccttgcagatggccctactttgcaaacaggacagccccattcccatgctgtcattcccattacatcctacttattaatgacagaacgatgacatgctttgagaatcaacaccctgctatagagagcaagtatttttgtttgtatttggatcataaaattaactccctctggggtccccctagggaggcctcttttttttttttttttccctcaaggcaagagtctcactctgtcaccaggctggagtgcagtggcgcgatcttggctcactgcaacctccaccttcccagttcaagcgattttcctgccccagcctcccaacaagctgggactacaggcacacgccaccatacctggctaatttttgtatctttagatgtggtttcgccaagttggccaggtggtttcaaactcctgacctcaggtgacccacccaccttggcctcccccaaagtactgggaatacaggcatgagccactgcgcccggccatcttcgttctaatctaatactttcccacctccctgctgccttctggattctcaccctcagcctctttctttcctcccaacttgccgtttctcacccctgtgtttggcaggccctcctgttgcccactgtcacacccacctaagactcctcccaggttacacactacattcatggccggtctagacttaacccagagctgctgactccatgtctagtgttttactcagttgtgtcacctcttcataattctgagcgggattatcaattgtacttacccaaaagctgattttttccccccctcaatcctgggaagttttggacagttgatcttttccttctgttttccctcctgcttacttcactccaaccatttctctttaaaccaggcagagtccctctgcactggcttttctcccttcctggagtgttcttctccccatgtagccatgtagctcagttcctcactgccttcaggctttcaatcaaatgtttccttctcagtgatcctgcccttgaaattgctgtttgcaaaacagtggtcaggataggcctcatttagaaacggtgattcaaatatgactaagtttgctaacagctgcagaacatttggtcccaaagcagccgtgaatggagtaatgaagaaatgttctggacagagtgaagagccagtgcaaaggccctgggggcagtgtgttcatgggacagcaaagaggccagtgtagctatacctaaaaatcagaaagtggaagtgaatgaggctgcacaggatgtaggaaccctttgatacagtccctgtagaaagtggctagtcagatatggtcctgagaccagcagcatccattttattaaaaacgcagaatctcagctctcatcccagacctactggatcagaatctgcattttaacaagcttcccagatgatttgcctgcacattgaagtttaagtggcgctgtcataaatcatcttccatttctaatgacttaatgcccaattctttccactatccactccttccttccctccttgcataacaccaggcagaggctagccctgccccagtgatcttaggcatttaaggaaaagttaattgcttttcctctaaaaaaaaaagttgtgggaaaccctgaagaaaccaaataatcattgggctaaaaacagaagcttgggctttcatacactttcctaaaattaattggtcctttgtttagggaatgcctcaggttttcttcccctagaaactaccacatcctgtccaaataaccttccaatcttccaatgtaatacattgtttattggggtgtgggagtgggtgttcagtgcacttccacaattcctgattactgcacaggtctcttctatacattgactgttcatcgtattttataaagagctttctttttttcctatataaccaaagcattgaaaatattaggctattaacataccaagaaatgcaatcaatcagctgattatcatctaatgttttaatgatcacatttttaatccaattatccatgtttgaatctttcagattttctttaattaaaaattgcctccttgcactgctatcagaagtaagaaattgaacagaatcagccagatataatttaatgttgaaaggaaactgcaaggataactgggccgcgctgggcttaatggttgaccatgacttgaaagcccttatacaaaatttcctaattgataagaaaaatttaatcatcttcagatataaaccctttgcattcaaataaggtatttctttttccaaataaatctcccctaactggttattcatattgtcattcaaaatgcttaaaaatgaaagaaagcgttgggtgaaatgtagactacttaatacagtgtgtatttaatataaaagtcatacattattcatttttgcaatttgaataactttgaatttagcatcgctgttcctcatctttttctttgatgaacaattaattattaaaatataatattgtctgcatacagcacccgggatccttgaaggtggaatacgagatgcatttcttttcaattcttttatctagtaatgcacagtacctgcttattatggtataatggaatgaatggtggtataaatagtttttcaaatatttttctcaactagtaagtggctgggacaggaatgttttgaattcaaatgactaattatgataaaagttggaggcagaatgcactgatcaggatgggcatggagtcacactgcccttttatagcaagacttatttaacaagcactatgcatgcttactgtgtcaagcgctctcctaagctctcacctgatgttaactcatttgagtcatactcagaacctccttgtaatgtcagtgttattatcccattttacagatgaggaaacacttacacaaaggttaaataacccttctcaagtcaaacctttaagtagaatagttaggattcatatccaggggacctagctctagcacttctccccattttataatatctacatttattaagattttattagccaggcatatgggctcacagctgtaattgcagcactttgggaggctggggctggaggattgcttgaggccagaagtttgggaccagcttgggcaacacagcaagacctcatgtctactaatttttttttttttttaattaggcaggcatggtgatacaagcctatagtcctagctactcaggaagctgagaggggaggattgcttgagcccaggagttcaaggttgcggtgccaccacagcctagtcaacagagtgagaatctgtctctaatttatacaaacaaaaaaaagattttataaatggaagagtttacgttttcagctgaaaagtgctttatttcttcctcccagtggctatactcaggaaccaccagtcttgagtctggccagttgagcccctatggcttaagctggcatcagtggacagtactagaaatgtagagctaccatttctaaaattgtttctaatttgtaattaagcattgcaagcaccccatttatcagtagagcactgtcagtgggactgagcaggcaatgaaattttcagaaagatcactgcaaactgctcttcgacttgaactgagatgggggaaaaagtcgagagttaattctgtaatgtattgctcgtgttaattctgtaatgcattgtcatttactaatgggggcacctgaacatatagcataattccccccaccccacaggtctggctatggctgtcaaggtgactttctgatacttgggattcctttcccacttcccacccccaacacttgtgttaaaataggggcaggcagaatatgaccgaaggccaaatccattctactgtctatttttgtatggcccctgggctaagaatggtttttacatttaattcctaattaagtgaaatgttattcccccaaaaaagaatcatattattctcattaagtagatatatattttgaaaattgttctcagttattaatagcatttcaaatacagttaataagattgtgaaagtgtgcttgttatttaagtacctacataacatcttcaaattcacctcttggcctgcaaagcctaaaatatttactctttggtactttatagaaaacggttgctcgttcctagcttaaaacccaaaatgagccagcctgtacctcatctgggcttgtggtcagccacatgcttgccttgataaatctgggcttacactgggccaggaactataccaagccccttatgtctgttaacttgcttaattgtcacagcaaccctgagagtaaatattctcattattctcattttacagatgatggaagtagctcagagaggttaaggcctaggcctaaggttgcacagccatcaaatgtcagttaattcgaagcccatactggagctttggcaaagaaagctttaacctagactgctcatgctgatggacaatatatctaacatggtatgcctttaagggcacaaggagtaatccagttaaaaaaaaaacaaaaagacatgcacaaaacattaaagaaagtacatgacagaacattggtagcttagaggaataatagtaaaagtaacaacaatgagagtaagaataatatctatcacgtatgagatgtttactgtgttcccagctctttctgaacctctttcttttattgacttatttataatcttcactactgcagcctaggaaggtttcgtaacttgcctatgctcacacagctcacagatagcggagctggtatttgaacctgggcaggctgaaaatctgttctccagcagcaacccttgaaggaactcacaagtgctgggggtgctggtgcaggcagtggttagatgtcagttttcagccctgaatgatgttttctgctctccaggcatactgtttcagattccctgaagaaagaatcccatgtgagtctctgtattcttcacatgtttttgaccttaggtcttttacttcatcctggtcttctatttatccagccctaaagtcaaagaattggactaaatcgatggttttcaaaatgtccctggatcccctactcggcttcagccaccagggctgacttaacttatttgagttgctggggtcttgagcaagattttgtttgaagagaccatcctttggcctccaaagccactgaactaagccactgaactgtccaagtcccttccagatcacaaagtcctaagattcaatggcagtgatagtggtggaatgaataagcagtgaagccaggccctcctcccctgtcccttgtactgggtctacccacctcgccaccgatctgactgcacgtgctgatcagcaaaaaccagagcttgcctctgaagccctggtgttggtcaagaacagagatgcccttttgagtttgcagcaggggtcacacgcactttccatcatgcctgcttaatccatgagcccatctgagaacttacataagagtccgaccctgcccaatcagcgttcccctttgaaatctaatctcctcctgttggtggggcaggtgcttttgctttatcttttgatgctctttaaagccatggcctcttcctatagtgtgtttagatgggggctcggctgccaggggtttgccggggttgtcttgtcacttcctgtcagcatacagcatgcttaactgcaaccctaatgttggactcggctctgaggggaaaactcttctgattctctagccattcggcctggatcccttgatcctaaggcaggttggtgtgctgcagtgtgactcgaagttcacctacaacatgagggagacatgaaggtggtagttttgcagttggtggtgccaagccctacccacaccctctatcgcttggggctttgtgttgactctttacacagcccaggaagctcagaggcagcaagcaaaggccaaaatattttcttctccgggccaaaccagtccccgccaagcatgcttgcagagatttcccctgtcattaggctgctggtaaccaggtttaaattaaagcccagacttgccagtgggcggaggggcaattccgttatttctagccttttgtacagcagaaattgtttttgtaattttgattatagaaccctatgatttgaagacttttgcatttattgggtaatactaaatttttattttagaaaaagacgaattgaacacctctctgagaatcagccaaggtttctgagcctcacgaataactgctgttacttcgctgttcaccagtgcttgggcttggttatttaacctctctgttccttgatttccacatctgtaaaatgagtattagaaagcacacacttcatagagttgtgaactaagagagcatagtgatgtgaataataaaagcctggattctaaacccagctacctgtttctgcatcccggctctgtaaactggggataatcatagaactaacttcatggagttattttaagcattaaataaattaatctttataaagctcttagaacagggcctcttgcatataataagtgctgtttaagtgtttgcaacctgtaaatactcagaatagtgcctggcatataggcgaagctaaatcaatgttaagtcttcttcaactaatcttttccaaaaggaaattgcaattttaattataatatagttgattcttgttgggtttttgcattatcccctagttacacagacttctcgagtctggggatgcacagttgcccaaatttctgtactagttgttctgcatgaaaatgagaagaggaaggaaggaggaggtatgaggcttgggaatgatattcctgtagcctcaggtgtgtctatgaggtcacctggaaccctgttcccggggctggtggaagccatgaaggagctaagggaccccatgagcaggactccagtagtcttattgcatctccaacagggaaggggagagaatcccagatgtaaattcaagactagatgtctggagatgtatgtagagactagaaccttctctgactcacgaaagaagctagatagtttactgggcatgcttggaagaattataagatattttcctcatcttctctacgacactattccttcctgtcccagggcctttgctcatgctgtttctactgcttacaatgtttttctttaccttgtttgcccccacccttgcattttcacctggctaacctcagtgccttctatggctgagtcagagctgtgtggagtcttcggtgtcaagacacctggattcacatcctggctttgcttcttaggagctgtgtgaccttgagcagacactaacccattccatgccttgctttcctcatagattaatcatattttcattgttgggtctgaacttaaatatcatttcttctgtttaagggaagataccgccacatttgtaaaaagaatgctggttcctggggccattctttttaaatttctagttgtgccttggttgggcttcacttcgatttggagaggacttgggtgaaaccataatgaaatgtagccagctttggaattgcatgttactggtgacttacagttttcttttcacagtgattctctcattgtgtcccaaagtttgttccactgattatctatctgttcatagataattagagaagagttctatgatgaaacaagattgggaaggggtgggttaaacaaagtcaagcccatttcttttctgcaagacttctcagagattttggtatgctagaatattttgtctatttcctggggaagggagagggactttaatgtggcccaaccatgttcatcatggaacctgtattttattgaaatatactgtggtactggtgtcctcagaacacaccctgggaaatgctgctttgtttactgaggctctcccaccaccaaatgctagtgcttctcaggatataaacaaacataaggcttgcgatgtggcaccagcatgccgagggtgttgactgtgtctgcggctcggaatggcatgacttaccattgtgcttttcttttccctttttccccaaacagagaaggagacctttctggatcctttcgtcctccgggacctcctgcctgcatccctgggcagctattatcggtacacaggttccttgaccacaccaccgtgtagcgaaatagtggagtggatagtcttccggagacccgtccccatctcttaccatcaggtagatattcttcctcaagtggggtttctgtgtttacttgttttgtattgacttaacgatccagcatggctagagtataccactaaggaatttgttcttgatcctgtgcatatcattgattcctgcagtctttcccacaaacatgtttttgaacccaagaactgcaagcgatagaatgtggtttcttagccgcaaatgaaattaactcactaaagagaattgcactcatgaaatctgagtattgtttaagtattcaatcttgaggaggtaataatagctatcctcaatgatgatgaccttttgtgccagaaactcttctaagctctttataaatgttgacccatttcatcttcatgaacaacactcttgtgaggtagatgctatttgtacccccattctacagtcttatgaggaaggtgctgtgcatacccccattttatagaggagatcaagccacacagaaggttatttgcccacaatcacacaactggtaaccatgccatggtgtctgattccaaagagcatgctctgaccactaagcctacccacagttcagaaaagaaagagatttgtggacatggagaaatgaaataaaacataccattgattgagttctttctgtgtgctatgtactttactcagcactttatacatatcaacttaatcagtggcaacacaaacatagagagatgggtattcacatagaacatcatggcgtggagagattgggtaacatgcccaaagattcatggttaatgaatgatgaagccaaaaactaagcctgggtttgcctgattccaaaacccatgtttctgaccactatattgtactgcttccttctgagtgtggactgagaacacttcatgggaaggcatgatttaggctgggcagttaactgtgggtaggaactgatgaactggagatagaattgaggcagtgtcagaggaaggggaaccatccaggcagtgagaggtctttaagtcacctcatgaggtttgaatgcatggttggggatgattcttaggagggacatgttagttgtgcaaaattcagcatggactgaattacaaaaagtgtcaaatttcttctgcattattcccaaaaatagagccaggaacgatgggtaggatttgtaagaaagtggatttgagccattaaccaagactgtccaaaactggaaggtacttaggatgtctttcatagaaatgaccacctcctccagtctgattgttctagtaccagttgaccttctgggtcttatgtcaagtattccagtaggtgggtctgaatagacattggccaaccaactacttggctggccttgggtcacatgtccatctttgaatgagccatcagaggtgaatgagccatcagaggtgccagatagcatcctgaaacatccagtgttacctgtcagtgggtaaatggggcaggttccctagaagaaggtaggggcagtagagacactatccccctaaccaagttaggtcatgtaaggccaggctgaacaaatttatttggcctcactgctgttttggcaatcattttactttcagatttttttttccttttaatctgaccctgacaataaagaaaggactggcgatttggtttcagaacaggatctgccagccttaaggagataatgaaataagaaatgagttttcttcctaatggtgatgccaacattgtttcattaaaaaaaataataaagttacagcccaaatatttatataaacagcgttggtggaaggaatttttttttcaagatccttttttgtcagttaataaatacttttgtcttgaaagattgaaaggtttacggctcagtggctcatgcctataatttcagcactttgggagggtgaagcaggaagaacccttgagcccaggaatttgagaccagcctgggcaacatggcaagaccccaatctctgcaaaaaaaaaattaaaaaattatccaggcgtggtggcacatgtctgttgatcccagctgcttgggaggctgaggggggaggatcacttgagtctaggaggtcaaggctgcagtgaactgtgatcatgccactgcgctccagtgtggatgacagagtgagactgtctcaaaaaaaaaagagaaagatttgagataatgaagttaaggaatactgatttggctacttttcatatagaattccatgtaaggagaggcagagagtcgttgattagctggagagaaataaggaccattaacatatgctgggtttcattatagctccagatttgaaacaaaaaacagtttggggcttggatgttttgccaagtgtttgtcttttagaagcattttgatcaccatttttgtaactggggctctgagaaagtgctttttaaatatctcctcactattccactctctgccacccatacgctcaaagaagaaataatgtaagatttgtatttgccttccaatatataacttctctctaggtattgtatttcagggaaatagaaaagaaatcagtcatatttgctttccaggttctttgctacaaaccgtcttaagataatactttagttttatcagacactgcttcatgtgtccctctctctctcccaagggaggaaaacagctcatattcatgtggccaaactggatccttgctggctggctttgtggaggtcacagctgtgtcagcccttggaaaggaaagcattcgccatccaagtattatcgcttcagaccttcccaccctgaccctgccaacattctttctgaagttagcacagaatgttcatttcagaaaggcgaacagccaattcggaaaagccaagtagtcaggaattccatgtctgcctctgacagaaagaaaacattcctagtctctcgttcttctacttctctacagtctctgtattctctcttttcttccctgtcatccagcatgggtgcctgcactcaatgaaaatttgagcatattcaccatgaaatataacggttagcacaaagtgttgacttgtatgatgtggatttctttgaagcctttcagagtacatacaggcaaacagtaatctttcttctcttgttcccttttgtgagtctagttgggcattcaagtcagccctgccagcctgtgcacttgtacctctggcttgtgtgataatctagattaaaatacagcattgctaatggaaccgcacattggtttgggattccccacttagtcagcatggcttatgtggcccctctaaacatcttctgaaaatatcaggccaaaatcatgtcccccaaacaaaatgggtcaccccaacaaaatggcagcactctcggcccttctgtgggatgtcagaggagccggacaacacatggagatggttgcaggcaacatattcatgatcagtcatagaagatgattagctttcagtccagttaactaggatttgttttcttctagaatagtgcttctcagatgatggttctttgcccataggcaactaacccaacccttcctttccaggactgtttgcatcttgtaggttaaaataaggcactacctatgattttccccagcttgaattttacttaagtgcttgtagggggtgctatcaaaaaggcaataaataagtctgactgcatctactttgtttacctttagatgtgtgattttttttttttttttttttttttctgacagtaagctggagtggacagaaaaggtttaattgcatgaccctttttaaccaaaggtatctgtgagaaacagtagagcagctctttgaaattaagactgtgtgctttggaggcaaactgcctgggttccatttatggctttgttcttcggccaaattactcaagtactctactatttggtgcctcggttttctcctctgtaacatcatgatgataatactcccctcatggagtcacaataaagattaaatggtggaatatgtataaaatgcttagactagaatatgtataaagtgcacatcacaggaagtgctttggagatattaggcgttgttgttgttgttggttttgttgttgttgcaggtattaaatgatcaccagcctttaaagcaggactgtctggtagaagtaaaatcacatcatttaaaatgttgtagtaatcatgttaaaaaatgtaaagagaaacaagtgagattaattttagtagtataatttatttaatcaaatgtatccacaatattatcactgcaaatgtagggctagccatatttctaatggaatagccacgtgtggctactggctgtcacagctgtaaggtttatctcaaggccacgacaactggtgagtcacttaattcagaacgtttctatttcaacacatgacgtgcagtgcatgtgaatgaaggaggttttttaatgatggggtgaagatgccatattaatccaagagagatggctttctttgttaattatggttaagtccttttccttctataaagccctttctataatcaccttcatgcaaaactgactgtagccacaggaggggcatggccctgcatttagctagctgttcttagattttatgtttgcagctgtggttcagtaagtaaaatttcggatgctccaggctactgggaatttaatattccattatcattgtcttgtttaataaggaggcaacaaacacgacctgccctgtcatccctcaaatgtgtggtgaagctaaaataatctccatgaccttaggtgagattttccagtttctagttagtatccttgggttccttgctgtgctaataatggaccgtggttttgtttaattgccattatatgcccatcccttaaactattgtacatatcagccttttaatggctcataattatattacttttggtattctctcatttctccctttcatccacagtggtgtcctgcccaagtcttgtggacaggagctctcgctacacacgaagggcatgaatagatttcagcttgcctttgattcgaaccgacagattaaaaactaattattctccgtaatacttttataataaaaactaagttgaaatgatttatatacacttcgagccaacacatttgcaattcaaggttaaaattgttcttgaaacagcaccagttaaactgcaattacaaatccccaagcagggataaaagaaagaaatgttttacacattcacttcaaaagtttaagagtcaatttaatattatagaaataaaaactttcatttatttttactaaatgataaagacttcattagttgtattaaagtcaagataaatccaagtgtgtttattaccctgctgtggcaaaggatcagccaagaaaagtgagggctttgggaggtggacgggattttctccttgggcctgctgtcttgttcatgcctcccagttctttctgcgttgggctattggcagtttctattcagagtgcagaaggatgaagatagatagatgtatgttgctgatgcagggtgccctgtgtggaatggccttgaggttagctaaagggaattgtttcaggacttatactatcactgcatccatttctccactgcagtgtggctctttcagtggataatgctaaggccttttatgcctgtggcatgaaatagctgagagcatacaaaatagagtcacacagacctgctattctaagcctcacttcacctcttggttcccgtgcctgcattagtccattttcacattgctataaagaactacctgagactgggtaatttattagaaaagaggtttaattggctctgcaggaggcatgattgggaaggcctcaggaaacttacaatcatggcggacaggaagcaggcatgcattacatggctggagaaggaagaagagagagaaaggggaggcgctacacacttttaaacaaccagatctcgtgagaatccactcactgtcacgggaacagcaagagggaaattccgtccccatgatccaatcacctcccaccaggcccctcctccagcattgaggattacaattccacctgagatttgggtggggacacagatccaaactatatcagtgaccttgggcaagttactcaatgcctctaagcccaatttccttactagtcaataaaacttatactaatactgctattaataataatattaccaccagcctcatgggatttctgtggattaagtgagagaaagcacataccagtctcagcacaatgccttgcatgtaataggcactcagcaaatattggctgctagtgttcatgatataataagagtgttctgtaatgctactttaatgtcattatttaatgtcattactttaagctaaaaagaagttggaaaccaaaataatgtctgtaaagtacttaaagaagtacctggcatgtcataggtttgataaatataagggggataaggaagggaaggttgatacagcattttacagttgttgtaagcttagagtacaattgtagttaccacattcctcatgaaataataatgacagtagtgatagtacttactgagcacctgctgtgtgccaggaatcattccaaatattttatatatcacaactctttgaatagttacaaaaaccacaggaaataggtaatgctgttacctccattgtacaaataaagacactgaggcacagaaagattaaataatttgaccaaggtcacacatttagcaagtagggtttaaaaacaggattttgtacccaggtagcaggggtaagggttttgaatttggagaattaggcataggccagatcataagggccccaccattaaggatgggaggctgttaaaaagtattgaacggagacattacgtgatctcatatatatttttcaaggatcactgtttagctattaaccagatctagaaaagcagaacagattacggaccaaacatcggaccggtcaaagacccagaaagacacaactttgtccgtatggtttgttctgtggctccagcctgatttccatattgcacaactctaggggacactttctcatggtgggcttatggcaccttttggaatcaaacaaagtggaggtccaaggcaagagtcagggtgtggggacagactgaagttgctgtgtaatgatgtatcagtagatttcgtcactgcccacttgccaaagtgagaaatgtagactcctctcaccaatccaaggctcctggaggtttttaactcactggccaagcatgccagttgccaaagagacaggccactggcgattttcatttaagttagaaaaatgacagggttttagtgaatgccgccaacccacagaaggacatttgatgagtgtgctaagctcgtcctcctttccctcttttgtatgactgtcaagcgcaactgtgatccagttgacaatataatatcattcaggtcatcagttcactcccagaaccatcacatcctttcttcaaaatcttggggcaagttaagttaataacaaggaagccaccatgcttttaaaccgtagcatgtcattaagctgcaatagcaatttaagtgaaagcatttttgtgttaaattcacaacctgcctcatttttacagttatgtgacttgttctttcctgaggcttcagaaataaactttttaggagaatttaatgctggctctgaaagaagcaagtattctagagaataaacaaactgcagagtcgtattgctgagacagttttctgagacaggccattcttttctggcatctcagagattaaactattttgggacagatggctgtctcttccagaaaatttccggtctaattcacgatgtatggcagcccagtccatttctctaaaaagtcatcctgaaagttaaggaatgtctctctctattaaactcacgtctctatggctttaatttaagccaatttccgtttatttggtcttctctggacatggagaagagctggtcagcatcttccacatatgaggggctttatgaaattactccttactcaccttttcctcaggctaaccaattccacttcctttaacctttcctcacaggattttttctccatctttttaatcattttgattggtctttttctgggctgtctccagagggtctttgttaatacttctcatatgattttaagaagttattttctctgagaaatcagaaacctgctctcacatttgatgcattcagttctgactttggtagtcctgtcaagtgagttcatatcatgaggtggaggtgatttttcagcatctttagttgtcttcatttgagtggctcacatttggacaaagtaatcagtccaattttcctaatttttctgtcatgtcttgcctttcctttgctgtaaataaagaaggaatagcagaaagaataggaaggcaggcagatgctacctagagacactatgagtttttatgatagtaaagtaactcagagaattgaagtaacacaagagtaacaggctgctttggcttttaggctggttgtgaatccgtcctggttctatgtaaaaggcagaaaaaattccatggtttattatcattttacataagctgtggaattggaggggaggtagaatgataggtgaattcatatacttcaatgatttttgcatggctaatatcactacctcaattcatcgctttctcatgcaaagagagggcagactgtttggaagcaggtcattttctgtgtcattctctgaggctgtttgagaaacagtgggggttagttccagggttcaggatgaccacctagaatttgcagaaacccagagagtgatttcccttttttattttccacattagtattaactgccttctggttccccgaagccttgacagtcactcaatgcacagagagcatctttctagcaccattcgaccatttctcctgcagaaagcactcttatttggcaccagaggatccagatgggccagaaacagttcattcagcttttctcttcattctattttcttctcctattagtatttttggtggctgcatatttcaaattacagttcttttttttttttttttttttttttttttttttttttggtgacaagaataactttgtggcctgttgaggacaagtctctgtcactcagttgctgttccattcctcatatgtaatagaattactttttttatttttaaaaatttttttattatttttttgagacagagtctcattccatcacccaggctggagtgcagtggcacaatctcggtgcactgcagcctccgcctcccaggttcaagcaattctcatgcctcagcctcccgagtagctggaattaaggcatgcaccattatgcctggctaatttttgtatttttagtagagacagggtttcaccatgttggccaggctggtctcgaactcctgacctcaagtgatccacccaccttggcctcccaaagcggtgggatttcaggcatgagccaccgggcctggccagaattaccttttttaatgatcacaatgttgagggacacaaaaaaatcccttttttgttctgttctgtttttgagacagggtctcactctgtcacccagactggagtgcatggtgcaatcatagctcattgcagcttgcaactcccagcctcaagtaaccctctcacctcaccctcccaagaagctgcgactacaggcatgcaccaccatgcccggctgatttgtgtattttttatataggcagggtctcgttgtctgggctactctccaactcctgggttcaagcgatcttccacctcagcctcccaaagtgctggaattataggcttgagtcaccgcacctggcccaaagaatcccttttgataatagaaatatgatttgggcaccctgatttttttcctttactttccataaaagttagatcggcagtcctgtaagagatgtttcttaataatattaataataatgatgatagctaaccttaattgaggacttaactgtgtgctaagcaatttacataaattttaatacttctgacaactttataaggtaagtattattacgtgttttacagttgtggatacttgagttacagaaaacttgaacagttcatctccgattacccatctggtaaatgttgaacttaggcagtttgacttgcaagtcacacatttagtgacttggcgactttgccaaacttgatcactagtatgtcggaagatgccaagaattaaatccctaatatttatgaagctcttatgatatactaggaactgttttaagcactgtacttggtttaaatattttgtcagcacttaaaattgacaaaaatccttttgggtaaatattgttatgattatcaccattttattgaggaaaaatggtggctcaggttaagcagcttgttcaggtcacagagtgggtaggcgatggagttagtattcatacccaggcagtctggctccgggacataacagtttgaccgtgaccctatgtttcttgctagaatggtaaaggcttttccagcagggcactgcagaaagactgggactctctcatgggaggcacaaactcagagtgcggtatagccctcaaatgaagtgttttgctggttagttggcaggacagaaaccacagccagatgagcctgttggcagtgtttccagcaggcagcctcaggtcctgctgggtttagcagccctggcattgggcacttcctaccgtttcatgctcttatcaccttcacctgctttggaccaaatagcttttctaattgatgtgtgttttttgtgttgttttttttttccccctcccctctctggtcctctgttcagcttgaggctttttattccatcttcaccacggagcagcaagaccatgtcaagtcggtggagtatctgagaaataactttcgaccacagcagcgtctgcatgacagggtggtgtccaagtccgccgtccgtgactcctggaaccacgacatgacagacttcttagaaaacccactggggacagaagcctctaaaggtatatttggcttaagtgccttgcccagaggaagattccttatcataaattactttaaattaaaaggaattcaaagccagccaggaattgggacttggtgttaaatgcatatgtttctctgctaaagggagcctgtctggctgaaaaataggagcaggtgtgggaatatattctgttaaataggtatgatagaaattgcccttttgaccaataatagataattctgtctgcatttctgccttgtaacttcaaaacttactagcagtgtctagagaaagctttctgaaaagtgtcttactttttatgtgtttccctgttgatcaggagcttatctctgagctcagacatcagtgaaacgggagagttccctgaccccactccccgctttgaaggacatgcaacaggaatgtggctcatctgttcagtcaccattcgctgctcagacacataaggtctaggggagcacataagggagggggagcacacagatgggcaggtgcaggagccagggtgagctccttggggctctggcactagggttatgtgtctgtgactcctgaagcccaagtgggcatgtgttacagtgggctctttcagccttgccgtctgtggacagcttaagtgttaaccagctcagtgacctcttggtacccaggtccttgtctggcgtccaggaacaatcaggtcgcccatggacttgaaggatgaatgtgggggttttattgagtggcggagttggctctcagcaggatgtatagggagctggaaggggtatcaagtgagaagatgatggagttcggccattcggtgggcagtctcctctctgattgtcccttgacattcagatgctccttctcttctccctgccacgccattctgctgttcttctgctcttctattctatccctctcgtctgcttctggagcctggggtctggggtttatatgggtacaggatagcgggatatggcgggccaaaaggcaacttttggtcatgaaaacaggaatgtctgttttcacttagggcccaagggtctccaaatttgagggtggggcctttgcccgggaactgcccgcttctagccagtatttccctgtctcctgtccatatcatcaggacctttgaattgctcccaacaccccagtatatagcagtcttactaccatccacccccggcaagaactcccataccagcctcacccctactggaaatcacttgcttattatttttttaacctattatttaacagtttaaccccggtatctgataaacataagtttatcattttcaggcatctcagtctttttccatctctacttgctcatgtgaaatgaatatgaatctctctcccaggaaactagaacttctggttctaccctcacacctctcctctcaggctctgggatttatcagaattgggtcacagagctccggaaatgctgaggggagcaaggctgatcaaagccctattacttggaagggaggaaggaaaaagaaggaattttcttttggtgcgaaaagggatatttcccaacccagtgctatccttcttcaaaattatgagcttgggtaataaagggagagcttgtgtcatttatcaacactggaggtagagtgggctactgttagtgtggtacgttacgtggagaggttttctttcaagagtgcccccacccccaacaaaagggaacagtttattggcatatggactttgtaggaacagggggaatgggattctattccacaagtaactgcagtgacatgcactttgatgatatgaaagagcccattttctaggctcatgtttctgaaaaggagctaaaagaagaggagagggagtttaagaatgtgatcatttccttcctgtctgtgtgattttgtttgaggttagtgaggagaagtgagtcaggcaccaggttccctcaagaaatgcttgagattcaagtaatttggggacaatagattgtcaagggcatcattctctgggaacaatgggagaattaagaagctcacaaacctgtgaaatatcttaggttgggctgccgtggaaaacctcacatgaactaattttttttttaacctagttaaaaaaaaatgaagaaaataacccaactagaaagctttctcccaagagaagttgactgagaaaatcaggtctcctggggattttgtgagagttatatgcagaggatgtggattgggggggtgaggaattcctatcacaagtgagtgcaagatctgatagctcagaattgctgagatggtgacagatacaaagctctttcctgaaaaaatgggccaagcatatgatatatcagctgtacagagaaaatgcatggcctttattatccaagaaagctagggaggataatggtttctattgtgttaaattgtcaaagtaggcacgatcttccactgaacgggccttctctgaatttgaccacaaccacagaaccatccttaaatacggcaaattcatgtgtcattctactaggtttgtttgaattatcatagtgctcgttgctgactctttaagacatgggaatattaaaatgttttctgatatttttagagccaaagagagagcaggatctagatgcagtcctatttgtgtgtttaacttattattggagagctacacgtacataaaagtgcagtacccgtaatacgtgcacagcttgatgaattttcacaacctgagcacacctgagtaacaagcacctagatcaagaaactcccgtctaggatctcaggactcccccatcatcccccttcctaatcactctgtgttcccaagggtaaccacttccagaaattcacttagcctgtttaataaattgcataaagttagaatcattcagtatgtcctcttttgtgtcttgcttcttttgctctacagtgattttaagcatcctctctgttgtggcctgtagttgtagtttgttcttctgtattgctaaagcccattgtgtgattatacctgaatatatttatccatttcagtatacatgcatatgtagattattttcaagtctgggtgattacgaaaactcttgaacctgccttttaatgaatatgtggatatatctctattgggcatacacccaggagtaaaatggcagcatcctagagtacacatattttcaggtttggttagagactgccaaatggcttcccaaagtgactgtatgtgccactttacacttttgccagcagtttaggaaattttcctatttttacagcatttttttaaaggcataatttacataccataatatacagctatggtaaatgtataatttgataattttagcaaatttatacttgcgcagccatcactgcagtccagttttagaatattttcatcgccacagaaagttccttcctgcccatttgcagtcagttatttctcctgccctcaaccccaggcaacctcaggtctggttttgtctttcacttggtgttaatgattttaacatttacccatgtttggcatgtatcagtaggtcattttttttttattgctgaatagtgtccctatttttttttaataacagctttattgagatttaattcacataccatgaaattcattcttttaacgtgtacacatcagtgttttttactgtagtcacaaagtcatgcacccattgccaccatttatttctggaacattttcatcaccccaaaaagaaactccatctgtagcaatcactcccattctccttcccttcgtctgccctgtatgtccctccctcccttcctccagggctaggcaaccactaacgtaccttttgtctctatgaatttgtctattctgcacattttatgcaagtggatcatatatgacttttttgacttagcataatactttcaaagttcatctgtattgggggctgtgtatcagaatttaattatattttgtggccaagtaatataccacataatatgtggaggtgccatgttttgtttatccatttatcagttaatggacattgagttttttccacctgttggctgttatgaataatgcttttgtgagcatccatgtccaagtttttgtgtaaatatacattttcaagtcttttagatgtaaacctaggaatagcattgctgggtcatatggtaactttctgtttacagttttgaggaactatcaaactattttccaaagtggtggcatcagtttacattcccatcaacagtgtatgagggtttcaatttctccatatcctcaccaacacttgttattgtgcatctcttttattttcaccaacctagtgaatatgaggttgcatcagtttatagttctgatttccatctccttaatgactgatgatctccctgtttgtttttaaatgcacatgtcatggaaccacagcccacatgaccaaatgttcctccttttttttccctacgaagactcaggtaactcagcgccactataggccaaaagatgctgacacatcatcaaacagcctggagggcttagattattgaccttagagatgtaagcaggaaagagccaaagcatggaacaagtccttttccttcctctactcttctgcgaaaaaaagttttaaaaagagaatgagtggtattctgtaatcttcaggtaattcaaaacgagcaaagcctgcctgattggtattctctatctgataattattggaagctttcaatgcccaggaaagctatgatgttttatgcattcatcgggctgttgtcacagaagaaggaaaaataaattaattacataaggcaggagtcatttaacttttttggttaagggccagatagtaaatgtttttggctttgttggccatatggtctctgttgaatcctgggtacttgtgggacattggttccaggacccctacggacaccagtatccttggatgctcaagtcccttatataaaatggtgttgtatttgcacataacctgaacacatcctccagtatactttaaaatatttctagagtacttataatattaatacaatgtaaatgccatgtaaatagttgttatactctactgatttttgtttgtactgttttttattgttatattgctattttttattgtttttttttccttccaaatatttttggtctgtggttggttgaatccatgcatgcagaacccatggatataagtgccgactgtactcaattctaccagtatagcaggaaggcacctgcagatgatatgtaaatgagcatagaaaatgtcttgcggtaaagttttatttccaaaaaaagatggcagaccagagttggccttgggactgtagtttactgacccccactctatggagtagcttaaactgagttggagaaccctaaatggggaaatcataggcttgttgtaagatacatattttctgtcttcaaggtggtaatggccatgactgtgaatgtgttggatctgtgtttccattccactgaaagaccctaggaccaaccagagattcattaacttggtaaccacccacttacacttcactttaacacccggtcatctttcacatcagaggggtaaccagagcctcagttgactgaatatagctccccgcctcctctgttccctggttatgatcgtgaacttgaggcagccagtggtgggggcctgtgttcatgcacccatattttatcaggatgattggacgtcctggaatagagaatacagaatccagcctttcggtgccaagcacaagaggcagggccccttaagaaagaagtgggggaaaagtcatcttaatattgtattgttgctgaagaaagacttctatatggatgtcatccataaaaaataataaagctctagttgcagtaaatggaaacaatatttaggcttattggattgttcaagggacatccgatttgccactctgccctttgtcggcaaataacttagacagactttaggatttaatgggctgtcatttcagttattctgcagcatatcccgggtacatgggagagcattcagtgattaagtgctgaatactgtctattgtgaagacttttggaacagggaacagagaaaaataactttccttccaacaacatgaaacatatggtttattaatttaaccaaacctgttcaaaccgcagtggaatcaaaaccacttgatctgataatttgatttgatggcttaattaaaatgacactgtataatgtaataaaagcaaaggaaatggagaggacaccgggctgcctgcataccctctaggctcctaagccgatgtcgtgtttttttggtgagtgttttttgcctctgctgatggagggatctcttttttagctatgttttcaattctaaacattgcttcctgttttggttaaaagcacttttaaaggacatgtaccaccgtgcaaggatgcctgagtaagtagcctatttaaaatcagtacattgagaaagagggtcacattttctatccaaattagcaaacaaagaagtaaatccatgactggtttaaaaaagagtttgacattgaaatcatggttttctgctattttgggagaaaatattaatgttgttctattttcagtttaatcatttctactcaccagattaatgagcttgaattacttatcttattaaaagaagctctgatatgaacacttaatgcctttgcaggcagctgccctcctagaaactcttgcagaaagttaccttgttactgccagaaacttttagcataggaaagtattaagaaaaacaaacttttcatgcagcccccatggagagtttttaacccccttctttcaaaaataactttgatttgtcattctttttttaacctggagtgtttaagaaagaagacaaaaaaaacaggtctgtttcaagacccttggaacatcctaggctctcatacttctgaaggtcctgccatattatatccaacatttttaaatgctcagacatttcatgattactctaagtttatgtaaatatatgagttggtgttaagttgcatttgataggttgacataatgttgatattttatagacttttaatgtagcattaaatattttgtatcaattgttgtagctagtaaatttcttttcatatgtcagacattttttctagctttgaaaagcttattgactctaggagtggtgcctgaaacacctgtggtcagaaaggctagcaagagagccgagtgccgtggcacgcgccagtagtcccagcttcttgggaggtagaggtgagcagttcgcttgagcccaggagtttgaggccatcctgggcaacatagtaagcctacgtctcttaaaaagaaaagaaaaagaaagtctgggaagaggtttttgtgtgccagatgctgtgctattgtttcctattcatagttgttttatttaatcctcaaaacaacctctgccaggatttgcttttcattcattaaatatttattgaccatctactataaaaaagttctaggtactagaaataaagttgaacaagggatggtccctcatcatggagtttacattctagaaaggagaaataaataaacaagtccactgatgatgggcttcaatgttgtcccaaagggaatcaaatcaagtcgtgtgctaagagcggtagagtgtggtgaggtggtggggaggagcccttctagggataaggcaagtgaggacagggagccagccccacagagatctggagaagaaggtcatttgcaagggccctgaggcatgggatccaacctagagcgaggtaaacaaagggggaagcaagatcagagagaagagctggagaagcaggcaagagcaactctggcaaagacttctcttggtaaagagttaagactgttaggagttaagatcttctagcagtgggaagcctctggagggttttaaagaggactctggaataatcacaacgtctataaacttattgttctggctgttatgtggcgaatgcttgcagaggacttgcactggagtctgcaggaccctgcaagaggctgatggaaatatcgcaggttggatgaggatgatcatagtaaaagtataagtgatcattaggggtggactttggaggagagctttggagatttactaacagtttggatggaggggtgggtagggtgagcaaagtgagaaatggagtattattgtttctctttaacaagtgaggtgtctaacgttcagagagggtaagtgaatcatccaaagcctctcagccaggaagtggtagagctcagacgtgaaccaagatcctcttatgtccaaacgcaatatttccatcatccaagggaccgccatcttccacaagaacttgcaagtggtgcctctgtgttttggatgtcatcgggtgacttgaacaacacagtttagtactccttccctgaatgaaggagctttaaaaggaaacatacttgtgggaatgaggtgctcttaccttcctaaaagtcatcactgggctcagtctttatctgcttggcttttatctattttgtcaggttatcttgggtgctcagggcatagggtattggtcacagggttagtcctgagagtcctgcacccacttgatctgtaccgtggggccatttaggcagaagatcttgtgcatccttggatgaggagggcctaacacagtacctggtacatagtaggtgcacagtcattgctaagtgaacgaatgaataaataataagacaggataaggcagtgttagaatacagacttgggattcaagcatacctagactgaaatcctaggaacgattcactcctttgtgaccttgctcaagctaatatctaagcttctatttccttgcctctaaaatagagataataaggcagagcccagtggctcacgcttgtaatcccaacactttgggaggccaaggtgggaggatcacttgagaccagcagttcctgaccagcttgggcaacagtgagaccccatctccaccaagaaaagaaaaaaaaatttatcttttttttaacattagctgggcttggtagcacacacctgtagtccctaagctactcaagaggctaaggcagaaagatcacttgagcccagggggttgaggctgtagtgagccatggtcatgcccactgcactccagcctgggtgacacagtgagaccctgtctcaaaacataatagtaataaaatagagataataatcatacactctcttcctcagccagtggcctttcaaataagacttatagtacaggatcttggatatggaaattactctgcaaataattgtatcttcttatctgtaggtcagcaatagcttctttgtatgcccaggacaacctgttatatgtgacatgatcattggagaacgtatttcagaataagggtgccatgccctcttcctgttagaagtgtgaagccaggctgttcgaacttgtcaaaacctttctgatgaaatgtataatccttaaggtggtccacacatcaagtcctgtccccctctccagccccgtcttgtactttccttcccttggcatcctacacttcagtccagcagccattctgcagtcccagcaggctgttccctctacctggaaggcccttgtcccacctctgtacctaactgacccctcctcagccttcataactcagcgcaagggtcccttccccaaggaagtttcctgactgccttgacccagccacttgtttcagggcaccagtacctttcccttatagtacttaccaaagttgaatttttacatctgattatgcgatatgtgatttttccccctaatatccagctctcccactaccccataagttctgtgaggggtgagacttttccttttctctgtttttattggagagagggtgctatggtaactgttgactcctcagtaaatactggattggatgggttgttgggtgggtgggtgggtggatggatggatggatgaaaatgtgaatccatggatggataagaggatggatggatgtgtggatccacaaatggatgggaggatggatggatggatggatggatggatggatggatggatggatggatgcacatgtggatccatggatggatgggaggatggatggatgcatggataaatgcatggatccatggatgtatgggaggatggagggatggatgggaggatggagggatgcatggatggattaagctaacatatacatatcaggtggccaggaataaaaaattcttaccaaaagagtttgcacaattgggacatgtatgatgtagcccaggctgggtgctcctactggggagcattgccaggcatctgaagtaggatgtcatgccagtactacttcctgaaatcagagaggctcctgggattggggaagccaccttttactctgaccaaaagccaccttggatggaagcgtacatttcaacaaaacatggagcgagggcttttctgtctgcctcaaggaacagcctaaaagcagagaatggagtcacttaaagtgtcaggcactcgtgtcaggatgctctcaggcagaatcggctgttatggcttgggagcgtttgagctgatactggtagcagactccaggggccatctagtgttttcacactttacctaattacttaatcctctccatctctaggcaggtagacagagtttgatcttcaaggccaacttagcaaccctactctggctttctttgctcactagaaaaatcttctctgacattgggtttacttgtgtgggcaccatggtgcttgtgaacagcaatctggaaattaataaaggccaacagcttccttactcccagagcagcacacttcccctttttcactaactagcattcacagcctatgaaacatgaggctgcgagacattggtgtgcctctcattggagccataggaggtatctagctgggagacatcttccccattcatcccactcattattcctcaaacaaacacgggttggttgaagctgtttttcttcaggtatctgtccaggaatatggacagaacccttctttcctagggcataagaaacagtctcatctccctgcccctgaagcctgaaaatcaaagaacaactgttaagacccagaagagggagccccatgtggtgtcctcttgagtcaggcttttcttattccttctcagcacagccagtggttgttacggttgctggcttcactcctgggcaactctcttgactggttttgtgattcctaagcactggctgggaccgaaataagtatcttggctgtcacatttcaaatctctgcctgtgctgagaaggcgctgcctgtatgtctgagactaaatgctgtcaggtattatcaggtgcacagagctatgcaattctttgcttccgggctggcaccaggaaaggcttgccagaagagaagagccttctcgctgaggagtgtgctgactgttgaaaacttggttttcacccaccagctgctcttcagagcgtatggacctatttgccaggggcagccaagagactcaagtggctcagtccctgccatgtgctgaattgatgattccacttgggcccactctcgggcagtgcctgcccatagcctggtctctccatcaactgacagtctccctgtttccttcttgggtccctttgaccaagtcttgacctgagggcagtaccaggtgtgggaggccctgaaaccataccagatagggccatccttaccaaatgatcagttggttcagacgccacatctggggattgaaatgaggttggaacccaaacattggagttcatcctaccactccacccacactcagccagagcagagaacaagtaggagtagcaagtggccaggaagtagcagagatgcagagttaacaggtaaatgccatgcgtgagccaggacactacttttaagcatagtaggtaccaagccgagcagactacctgtttccaagagaaattattttaaggctcagatggaaaacaaatgagggcaccttaaccatttgcatcataataatctagactcaagtatttctataaaatcccagctaaagccatctgtgtgggtcactggttgatttcctgacgtggctgttgggatcactaataaaaacagctcatgggatcttagatcttggatggtgtttggataccagtcttgtgttgctaagggcagctttagagctctattttaggtgacccgctgtttcttcatagtaaaggggactacaacattgtctcagcagtgggaagcaggagaaaaacatcgttatgaaagaaggacactgggcatttacccaccctagctccgcagccaggtctgtggttcagacactcagttggagcccttcactagggcaagacatggggagaaggtggaaggtcagaagcaccacgagggaaggatgctgtgctcaattaaagtgggataggtccgctttgctctcttagcaggaaatcacagcatcataaagttgaaagggagagaatgtaccccagggtacatggaatccagccttccacccagcgtccaagatgcacgcagctgttatcaagtgaggctgggaagatgcatcatcctgaactttgtcacctcccttagcgctgagctgaacaatgctctttcctgcacaggacatggacacctcccatggcctttagctctcagaggaagagggatatcatgtagaaaaaagaatccaaggaggtaagagaggtcagggagagcataatgtgggaagtcgaaaccagtgcttgaactggagaattgaatttctgcctctgctttcccagatactgcctatttctgttttctgagcatgtagctctgttacatgcacagcagagacagccaacaggataagaaacagttttcaaatttgctttcttccatggtaattgcaacacagagcatctaatactcatttgtttgctgagaaactgaattgtaattcagggcttgttcatggaaagggagatgtcattgtactgtgtagaagaaaagtccgcaggtaacaggtggcatcagtgaagacaccatggatttaaaacttgaaagcagttgtcctagcacttaggagaatctgggggcaactccgcaccagggtcccacatcggaagaaggtggcgggctagccagcaaattctggcctcggcagccagatccaccccgggataaaccccagctccagtgcttcctagctttgagacctaatcttgggccactctcctcctcattccctgctcacagtcacactagtttccttcccagttttctcatcacagggcctttgtacacactttttttttctgtctgacatacccaagcctccttttttcctctttcctctataaacacctactcattgttgagatttcagttcaaactatgctcagtaagttttctaagcaactccccaagtttaggtcagggttccttattaaacctttatacagaactactataacattttccttaaaaagcgtgtaattatatatgccttagtgctagatgggtttaaccattttggtgccatggactcctttagcttatcttctcatattgatggttttagatgcttaaaataaaatataatagattacagaggaagccagttatcctcagatattttcgaaatatctttaaaattgtactaacttacctgcttcttgatgagggcattaaattacaagatccagctgcagatctaaaaatcattataatgttgatataatgatgaacatgaaggaaattttgaaatgcaactgagtcctgaacaccatggagattggagtgtccacacaatcaaatatccagtataaattttgactctccaaaaagttaatacttaagccttaccagtaacatacacagtcaattaacacatattttgtatgtaatatgtattatatgctatattctcacaataaagtactctagaggaaagaaaatgttattttgaatattataaggaagagaaaatgtatttactgttcattaaatgggagtggatcatcacaagggtcttcatccttgtcattttcttgttgagtaggctgaggaggagaaagaagaggaggagttcgttgccctgtctcaggggtggaaattcacttataaattgacccatgcagttcgaacctgtgttgttcaagggtcacctgtattggtaatcactgtaatctaacaggaatagctttgtgatatcttttggtgattatcacacaagtctcgtaacactactgtagtttgttgccaacatttaaaatgtaaggaaatgctacatttttgttagagattagtgaacataaaagtggacttttttgctatctaagttcacaaacttctgtgaattctatgcagatctcctaaggacactcaaaacctctgttttacggagattctgttgttgatgtgtgttctcccactgggctgtcatctccagggggtcaggagcatgacaacatgtgttcacctttatccatagttcctggtcaagggcctgacatatggccggtgccgaataaatagttaacagtaactaattctttgtttgtttgtttgtttgagatggagtctcgctctgtcgccaggctggagtgcagtggtgcgatctcagctcactgcaacctccgtcttccaggttcaagcaattctgcctcagtctcccgagtagctgggattacaggcacctgccaccatgcccagctaatttttgtatatttagtagagacggggtttcaccatgttggccaggatggtctcgatctcttgacctcgtgatccacccgcctcagcctcccaaagtgctgggattacaggcatgagccactacgcccggctaacagtaactatttctaaagtacgtttgctatatgtcagtccacgtgcatttgtgcatttcatgcatttatcccagaagcttttacccaagctttatccaaggccacacaactggtttgtctaaaaccaaagcagtctgaccctagagtaagcaagtgaatgaatgaccctcttagatctaggtctctaaaacaagggtaatgatagagccagcagccccacagaattcccgtgaggatttgatgacataagctgtgaaatgttctaacagcccagagctgggctcatcagataggactcgttactattaatatgtcagtacagagtaggccgggcgcggggctcatgcctgtaatctcaacactttgagaggccgaagtgggtggatcacttgaggtcaggagttcgagaccagcctggccagcatggcgaaactctgtctctactaaagataccaaaattggccaggtgtggtggtgggtacctgtaatctcagctacttgggaggctgaggcatgagaattgcttgaatccaggaggcagaggttgcagtgagccaagattacaccactgcactccagcctaggcgacagagtgagactcgtctcaattaaaaaaaaaaaaaaaaaagaatggcacagaatgaaggccttggtgggtgggcactatagcagcaatctgtatatttccagcatcctgtcactccttgaaggaccatgagctccctatgcgtttctgatgggggaagaggcgattgctgcgtccagttttagagagacccgaaggagttggaggctgctctggaaattgtcaagagaccccacattgtcatttgtcattgagaactgagaagggagtggggatggggaaggatgaaggagaagggaacgggaaggaagctttttacctgctgggacagctttccccttttaagctcttggagtaatgcccctgacatctttattagcatcttgaagataggaaaacagttacgggacgtgtatggggcaagtacatacatgactgctccatggagtgccctgtcaactctggttcagactcaggcagattgggattcagttctccattctcttctcactctggttccttggcccagcccagtaacttggtctctctgaagcccagtgtcatcatctttcatggggtgaatggagcccagctctcggattcggttatgcgttgtgtgcgggggatgatccgagaggaatgcacagagccgggcccagggcatgtgcgtggcagccgcagctccagctagaaatgattcagatggaaatgcacattacactggagctggggtcctgctttgattccatcgttcccagttccttcctccgtgtggtttgcccatcttgagctcttgggcagggatgggggaggcaacaccccaagcaccaagattccaggtttgaagtcctacgcgggctgctgaggaggattctgtgtttacctagacctctttcatatagcccttcaaaaagataatcactccctgaggccatttctctggaaatttcccttaaaggattccatatttgaaggtgataaagaaatgacaggcatttaagcagtctaaggcaaggcttgggctctcttccacctgactggttccctcctgcttttaacaggaaatgcctcctgctctttctccccaccagggccaggcagtccccaagaaacaggcatctcccccacggtcgtctgctggcttaagccaagctgttccctctgacaccgcccctgtgtggcatatgatgttgcaacacctcccacccaggaagcagcagtttcatctgtgttgacaggcactgtgaaatagtgaatctgcaccgaattggtttgtttgagtagtagtactgtctctttgactcctgatcaatatttggccagttgcgtcgggtgtgaaactccgagggggcaggtgctggaagaaggcccctggaggaaccttgaactgcagatagtttaaggcacttggaaattacactgactttcagacagagcatatcacattagtttatctaaagccccaaatgaagaggatggggtgggggtggggagcctactatttactgtggaaccactgagaaaatatccttgacattgatttaggatcagaggaccttgggtgctctgctagaagactcttcattacttaaggaagcctgggatcataattaaaggtggttcagagtgaaggcagaaattctcagagctggtgaggagcagtaccttcatgcctgtgagaagcaatcggaccccagtgggaacataatcaggcccctgaaaggggaaaggctgttgtcaggaggcctcacaggggatatttgtttagagatccgggtgtggcacctcccgcatggttaaaaggcttcaattttgtgcaaaaggacgtatcaagaggtctatcagacttccctttgttaggtgcagtttacaaggaccattgagaagagatagataagtacaagtattgggcatctgtggtgtgccctcgagagtgctcctggtgttcattttagaccagtagaaaactcacctcgccttgggggccagagagctgccggggaagtgggctgagcagaggcaacggggagtggtggagactatggcaaaaaaaaagaaaaattgagtacacactcccatctaaaggaaatggttgctctcctgctctagctcaccactgccacgtgtggatgcaggcgtgattttaaagcccatatttatatgtaaaatataccatttttttaacactgtgtgggccatagagtgtgtccacgtacttgccattgggcctgaggcccacaactttgggtttatccacagtgttccctcgtaatcctcactgcaaccttgtgaggaagataattgctagaccctagtcatccattttacagatgcggacacaggatttgcatgggtctggctccaaagcccacactttctgttataccagctcttccaaactgatctatagaattctgttttgctgcgtttgcctgtttcctttttggacttttgagggaggtgttgtttgaaagaagggtttccatcacttaaagagcaagcagaactttggaagcacaaggcacagtggtgtctgcctgctcgcttgcctgagttatttgacgggtgtctggtactatcgttgccccagtcgccaagcatcggtggtttttgttccctctgtagactgaatgcttttcttattagcagaaggcatgagttaaagaccagagacaagatcctcaacacatttgaggctcctggcagtgaccccaggaatgaattgtgtggcactgattttgtacatggaatcctcttcaatggaggacgctcaaaacagcatccctcattccgtcagagaaacgcgagcccctgccaagggtaccagtgataaggagcttggtggtccctgcctgggagatgcttgcagctcagtcagggggacacagaggtgggtaggtggtgaggacagagggtgatgggcacacagggtgaggagggaagcagtgagagtgcaggaggacacgggtggcccatcggcctcagaggggaagcagggtgttgaagctggatttttttcttttcctttttttttttttttttgagatagggtcttactcggtcacccaggctggagcacagtggcatgatcaaagctcacggcaaccttcacttcttgggttaaagtgatcttccaccttagcctcctgagtagctgggactataggtgtgcgccaccacacctggctaatttttgtgtttttttctagagccggggtttcaccatgttgtccaggttgctctcgaactcctggcctcgagcgatccacccaccatggcctcccaaagtgttaggattacaggcgtgagccaccacgcctgtccttgaagccggatctttaagggggctggggtgggggctggccagagatgcgtccatgaagaggaagatggcaagccatgaggctgacgatgtggaaggggaacatgtcacacaggacctgtggaccacgggaaagactaaggctgttactccatatacaaccaactttctgttcattcagcaagtattgattgagagcccactacgtgccaggcactgtcttagatgcaaggtaatgaaccagacaagacagaaaaggcgccagccttgtggagcttccacctagtgggggagatagataattacagatcgtcaatgaagtcaataatacaactccacgtactagtaagtgctgggaagaatctaagctctgtgaaggagcaggcctgtcagcctgtgcagaggggcagaattcagtgccaagaatacagtgcagttgataattgtgtttcaaaaaaaggcttggcctctccttactgtcgcaatctgggatcagcactgatccacgggccgaaacttactccccaccaccttttgtgtaaccatgagctaagaatggtttctatatttttaaacagttggagaaaaatcaaaagaatattttgcaacacatgaaaatcctatgaaattgaacttgtgtccatagatatttctgctggagcacagccacactcattcatgtttacatactatctgtgctgctttgtgcttcaaaggtggaatcagtagtggttacgagagaccatgtggcctgcaaagccgaaaatatttactatctggccctttacagaaaaaatgtttgccatcctctattctaggccctcctagtactctgcaaatgcctcctccaaatttggcccagtatagctagaaaaagccactacccaggatggggggtagagaacagaagagacatctctcatcagactgctcttcctatagctcctcagcctgcaaagccctggcctcatgctcctcctctcgtgtaatcagggacaagcatggatctttggaggccattaagttacagaattcccttcctggcaggtgatcctgttagagcgaggccagatctacctcctttgagagcttaactcagtattttttaatacattgagacagtgagattctgtaccatcattcaagacaatgacactaagctctacttattgacgaggaaatatacccatgagttgttgagtaaaacacaacaacaaaaaattctagggccagtcatggtggctcacgtctgtaattccagtactttgggaggccaaacagggaggatcacttgagcccagaagttcaagaccagcatgggcaacatagtgaaaccccgtctctattttaaaaatttaaaattagctaagtgtggtggtatgcacctgtagtcctagctacttaggaggctgaggtgggaggcttacttgagctcaggaggttgaagctgcagtgagccatgatccagccactgcactccagcctgggtgacagagtgagacaccaccacaaaacaaaaccaaacattccattctagtgccatccacatcctattctatttctatcaattgtgcgtatgtactttcacatgtatataaagagataactgcatgttggagtcccagaatgttcacaatcgttttctctgggcactgagatttggggtgaattttttcttttaactttctttttacttttttgtactacttgggttccttttttaaaaaatattaacatgaatcatcttaatgcacacagaaaaacccatctattttaatttcaaaaaataagaagaatggttgcatctgtatgtgggtgacagaattatttatgggggtatgatgtaactgtcagagagggatgcttccccatacagtgttcattgctatttggagcaggggaatgaatgctttcagaatgaggaagataaataagaacatggtgggaggtgagaaaagatagagaagttaggaaatctgagatggtcatcattatgggatatagaagcttcccaatatgtacatctcggttcgttattagtatttggaacgctgggggtgtagctatttcctgatctttcccccgcctcctccgtgttctgtcttgaaaaactatgaagccacttagaagccggagtatttaaaaacagtaggttggcgccacctagtgcccacgttctgtcactccgccctcatgtctccgtggaagcctcccttcagattctttgtttgatgtcccttctctggtggcatttgcgcagcggacagcgtgatgcctcccaggggttctgcggggcagtgggaatgacccactaatttatcccttcctccctccctcccttccttccgtttctgtcgcactaagtgaaccttaccaactgaactggggtttggcagttgaagagtaaaaggtggcctccctgtcaaaaccaatctacttttctccaccggccaggtcctcaaagctgggccatgcgtctctggcaggaaagccatcctgtccccagagctgccttgggttttgggttcttgagtaggaaatacgggagtctggttcctggtgggctgcagggcatgtgggtggtctttggaagatgccagcgggtcagaaccaagccgtggtcccctggcctgtctctgccagcacgcccgcttacttcttacccggttcctgcacccaaaccagaaggtcctcctcaccctcccctgccctccttacccggcacatcaccaggcctctgcgttttacctcctaactgtaagctctaggacctgccattcctccctggtcttccagcaattggccattgccgcccctcctcacaggccccctcctccacacttggcttctctggggccttctacactcagctgaagttcaggggatctttgtaaagcaccaacctgattgcatcactctggggctcagttctttccaggggtgtccaaggactcgtgggagaaaggccagagttcaaatctggccccaaggcttctcactgcagctacacctgtgccctgcctgcctgtcttttctgtgacttgctccagcccctcagaccttcccaccggatccctttacagctcccacccccttcatctccataagctctcagctctcagttacatgaaccttcctcaagggcatcttccctgggtgccaaagcccgagccacctcttcctctccctcctctccctccatcctgtcctggcgtgcagtgatggctctgcgcatgggattctttggtgagcctccatctcttagagtggaggttctcagccgaaggtgattggcccctgcaagcaacctttggcaacacctggagacatttttggttgtcacaagttgaggacggggagcagagctactggcatctagcagatggaggccagggatgctgctatacagtacacaggacagtccccaagagcaaggcattgtctagctcaagaggtcatgggtgctgagggtgagaacccctgccctggaccatcagctccatgaaggcaggcagcacggccacacgggtctggacacccctgagaaagcacacatttccggctgactggattggacctgttgagcatttgtataactcattcagacctgtcaaggtctcaacactttcataggtttgtctgtaaatagatttagatccaccgtgtcccttaaacctctcagccccaaggaataagaagatgaatgagcctgacttttccttacaccccacgtcaggataattacacggggttctgctgttccagagaaagtcatccttgtgttatgtgactttgctttaaaattatttaaagtctcatcttaaatttatttatttacactcggacctgtttacaataagatttcgtctacaattttagttagcacactccaccagtccaacggcctggcttcttcaaaacgtccatcatgaagaaaaaggctgttgaccatgaggctgaagtcagggggacacagtgattaaggatcttttggagacagcggggaaaatttgaatatggactatatatgagataatagtattgaattcatgtttagtttctttcatgtgaaactggtattatggttacataggagagtgtcctcaatcttgggagatgcaggacagagtatctagaggagaagcgtcagaatgctgcagtgtttactggcctagcagaaaaacagttctgtgtgtgtgcgcatgtgcatctgtgtcccgtgcatgtgtgtgtgtgcatctgtgccccatgcacatgtgtgcgtgtgtgcgtctgtgtcccgtgcacgtgtgtgtgcgcatgtgcctctgtgccccgtgcacatatgtgtatgtgcatttgtgtcccgtgcacgtgtgtgtgcatctgtgtcccttgcacacgtgtgtgtgcatctgtgtcccgtgcacgtgtgtgtgagagagagggagaacaatgttctccctctctctctacacacacaatgttaagaggacccaggagaagggagcatgggtgcttcctgtattactctttcaactttttgaggctgcagtccttaggggcacggattgaatggcgcattgttctgaaagctccctgagctgagccctgtgtatcttcagtttgcagctctccacccatccacatgaaggtgcagcctctgaaccagacggcactgcaggtgtcctggagccagccggagactatctaccacccacccatcatgaactacatgatctcctacagctggaccaagaatgaggacgagaaggagaagacgtttacaaaggacagcgacaaagacttggtatgaagcccctcctctgattcagggtacatgctgcagagagggactcctgctgcagctctctgccaggcactgcacagtgtgccagctctgtgtcatctgtcctcacactgtctggtgaacatgggcactgccattgctgcgctgctcgagagtgccggggaggacagtggatggagcctgcctgggcgccatcctgaccttagacttaacagctatgcaacccggagagccggttcatttctttagattggttcctttaaaactgactgctttttctttcattattaacagcctcaattaggcccttttcatctgatgggattatcataaatactaaatgagctatgcaagtattcaacaggtcctatataactgtataaatattaactattatttattacgatcattctcctcttcctcttcccctactaaagctactgctgctgatgtcaccaccaccactgtccacagtcgctgccacttccctttgtcacatttgttctgccttacacatttccaatacctgccaaacccctacagctgtgtaatattttatctcttttctcagatactcaaatgctatactatctgacctcactttgggctacacgtgcctaattcaatgtctcctctaaaaatttacataaatgtttagtgtccaacacacaagccccttcagaacagatgtttgcagaagccatctccttccctataaagcaaactccacaactactgtctttttttttttttttttttttttttttttttttgagacagagtcttgctctgtcgcccaggctggagtgcagtggcgcaatctcggctcactgcaagctccacctcccgggttcatgccattctcctgcctcagcctcccaagtagctgggactacatgcatccgccaccatgcctggctaatttttttttgtatttttagtagagacagggtttcaccgtgttagccaggatggtctccatctcctgacctcatgatccgcccacctcggcctcccaaagtgctgggattacaggcgtgagccactgcgcccagcctacaacttctgtctttaagtctttgcctaaaaactcaaagtgacacatttggtttgaaagccttgcgtttattgttaatcaaaggaaggctctggaataatgaaacccgtaattgtatatgcacatgaaaaatgcagtagcaccaagtgggattcttaatgactgttatcactttttttctccaatacagagtcctccgggcccattcaatcagttatagaataatacttttcatatttctttagatgaagattcttttacttcatttccatttatattttcaatttccccactagacattgttatctgggtcacgttagggaatgatgagcttcgtgaaatcaaagaggaatgtgttgaaaggcacccaaggttatgatgtattttaacctttctcttgtcacaactggaagtccataagggatttttctctttctggagtgaagatggcttgcattaatcagcagaaaccatctaggcgcttatgcagtttcttgttctaagtggaaaataattaaacatgcaaagatgaatagataccgtcttggagtgaattctaataaatccctgcatagatggagtgaagatttcgctctgaacagaagatggggtcagaggtttagagaatgaagcataaattagtttcagagaaaaagagagatgtagagaaaaacatgcattgacagcaacttctttcttacaagaatttctagggctggttattttctttggggacacacaaaattaatttttctaattcctcagcgagtgaagagtgctgacttagtggcaacagagctattctctaactcatcatggttattgtggcccagaaacctggaagtaatacatatcatttgagcagcattttctagagggcatccaccttccgcatcgtcaccacaaacctgtgggcaggtgttattgcccgccttttccaaacgagatcagtgaggcttaaagttaaataacatggccctagcctacccctctcactaggaagctgctttcaaggcaacagcagcaggtgtggccacaataacattttaataccagttcagaggttttcaatagctgcgttgggaaaacccactcccaatcggtggctaagctcacagagctgcttctatacttggcccagaacacatgctttgatgataagacaactcatctattaagaagagtctttgaaaatcagttgcttttgttgttcgtttctttaggaagcaagtgctgcctgttttttaggtagtttccattttctcgtttttaaaggctgtcagaatgaaactgtgaggaagagggacctggatttggctaatgtttgacaagaggttggcaaacttttttctggaaatggctacatagtaaatatctgaggctttacaggtcatggaatctctggcataactactcaactctgccattgtagagtggagggagccatacacctacctaaacaaatggccgtggctgtgccaataaaactttatttataaaaacagacagtgggccacagcttgccaacacccctatgttagccaagtggcattctttctgttgctcggtgtggtctacctctgagcaaggtttgctgggcctatgttatgtaattctcacaagtacctatgaagtagctcttcctctccccattttacagaagatagcagaggctgaaagaactgactcagaaccccacagcttgtgagtggtatgaggagactatgtcctctgccttctagcctggtgttcttccttgcatcatgccccatactctgcgtaataaaaatacagcgaggcctttgaactgtaaagaaacagacctgggcaggcagggtggctcacgcctgcaatcccagcattttgagaggctgaggcgggcagatgatcgagaccagcctggccaacatggcaaaaccccgtctctactaaaaatacaaaaattagctgggcttggtggcggcctcctgtaatcccagctactcgggaggctgaggcaagagaatcacttgaacctgggagacggaagttgcagcgagctgagattttgccattgaactccagcctaggtgacagagtgagacttcatctcaataaaaaaaaaaaagaataatgttactctttcctgtgtcctgaacatttcggtgttgaaaacaggttcccagggaagctcataaaaatagattcccaggcagggtccaagcggtctttccttccaaagtgagcctttggtcagcagggaagcatcacacctgtcaggcattgtcacggcactcaggtttggctttagaatgcaaagtgtgccttggccttcaaaactaactcactgctttttccttctttacttacagaaagccaccattagccatgtctcacccgatagcctttacctgttccgagtccaggccgtgtgtcggaacgacatgcgcagcgactttagccagacgatgctgtttcaaggtgaggctggcttcccctcctgtggccggggtgcccctgagactccctcccaatgctttctgcttcttcctgctcaggtgctggggaaaaatacaaacaagcctggcagaagaatcagtgtagggttttaaagcctatgcgggaagccctagtaatttaggtcttttaggttggaggttttatcggcagaagaggggagaaaaaacaaaacatttttgattgttttattgttattttccaactgtggggaaccaagtactcgggcctttttctcggtcactgtccagcgctgtgtcagatcacacaatcacttccaagttgtaccgctgaatatcctctttgtctttctaacgtgattcagttagctgttctctcaaaaactgcagcccatagcagctacacctcacccttccgacttgcaagccacacaaacaagcgcctgcatgcaggatccttgagattcctggatctagatagatggtcctgatgacttagggactaatagaaaggtccagggccagaactagggtgaagcaaatgggacatttgcctttgctcaaaattttaaggggcaccaaaaaattgagtgaccaagagacataacattttagtgggattttttttgtttgtttgtttgttttgagatgaagtctcgctctgttgcccaagctggagtgcagtggggtggtgttggctcactgcaacctctgcctcctgggttcaagtgatgcctcagcctcctgagtagctgggattacaggcacctgccaccacgcccagctaattttttgtatttttactagagacgggggtttcaccatgttggccaggctggtcttgaactcctgacttcgtgatctgcctgccttagcctcccaaagctctgagattacaggcgtgagccaccacgcccggcaatgggatgttttttaaaagcaaaattaggctgagtgcggtggctcacacctgttatcccagcactttgggaggctgaggtgggtagatcaggagatcagttcgagaccagcctggccaacatggtgaaaccccgtctctactaaaaaaaacaaaaattagctgggcttggtggtgcgtgcctgtaatcccagctactcccagctacttgggagactgaagcaggagaatcacttgaacctggaaggcggaggttgcagtgagctgagatcatgccactgcactccaggctgggcaacaagagtaaaactccgtctcgaaaaatgaaaatataataaaatagatacaaaaataaaaataaaagcaaaattaatgtaaaaatctcatgaataaaatatctgaattttaagtagagatagatacactctgtcttacttgcgccaacctaatcccagtcctggttccagtattatttaggcagctgtgggctgtagccacgggccgtagtttggtgatttggtttgatgacaggccttaagaccagcatggaagtagggaccagggtgctggactctgctctgccagcctgaggtcctcttggatcaggtccttgacttctcaggtcctcagttttccctgagggaaaacttatctgtcaaataagaaaaccacgccaggttaaccaggccagtggtgaacgctttttgagttacaaatctgatgaaggtttggacattttccctacaaagtgctagaattttgcatacaactttggggacccagtcaggcatgtgagttgtggaccagcagcagcagcagcaactgcaagatctcctggaagcctcatttgagaagtgcacattcatgggcccctcccagaccaactgcatcagaatcttacctggggcagggggcgttatccaggaatctgagctttcacaagttggccctgatggccctgggagctggcaggcactgtaaggggttctggagtgaggacctctggtctgagtcccagctgccttttggaagctgcacaactttgagaatgtttcttaactgcttgaacctgtagtttcccaatccaaaaagtggcagtatccatagtacctaccccatagggtctttgtagaatgatgtggggtaatggatgttaagtcattcacatagtgctagttactggcactatgtataaatcccccccttagtattagtatataaaaataataaataataaacctaggattagaagctctccagcctagatttcctgcaaggatcccttctggcttgaacattttccatttagtatttaaatattctttgctaatgttcacattgatctcatccttccatttaaactaatggaaatgagcatagctgcatttttttccataaataaatcatgctccctgtgcccacctttactgtgaacatattggtctctttccctgtgtcgaggaaggactgcaggccaaggccaggtctgtgctggcctaggggagaaggaaggaaggcagactgggagcttgctgaggccggggcccttggaacttcggacacataaatcatgattaaggcctcctatgtgctccatccaagagcctagaatctgcagaactgccttacctgattaatagacccagggctccctggcttctgcatggactttgaaaaattaaatgtttgtaatataatgtaattcaaaaaggccctgtcagctaataagttcaaagcatggaatagtttaaatgtctgatgacgatgacttgctgaaaatggccagtgtctccttgtctacagactttctttcctcagaggtggacgtgagtttactcattacatatattggcatttatccctctatgttgataagggggcaagttttaaaatggaaagaaaaaagatatctcctttttcagaataattaggtttctcagtaataaatttaatctggcttgggagcattaggaagccacatggaatatttaccatattatagtaaatataacactatttaggttgtatgtaacattgcaataaatatgtttaccttactgtggaaaatataacaataatataacaataataatagcaagcaatatttgtagaatggctcacagtgacagcattgttacataagttatttcatctgaacctcactttatggcagctggtgcagtaggggttattttacaaacagggaaatgatggcttgggtgcaggtgacttcagaagaactctgctactaagctgagttgggttttcttattgcaaagcccaatcactaacacacagcaatggcccaccccaaagagtaaaaattaccaaatacctgcagtcttcaacaaaaggttgaaaatattgatgagatattcaaagcctttttgcagttctcaacagtcatggaaaatgggggtttatatgcttcttctctgagccacagactcatccgtggcaaagcccatggatcctctctcagactggttttagataaataagtgaaatacacaggaaaggaaccaattatattcaatacagttgtcaaaatattttaaacacatttgggatataataatatatgtgctttttaaaattaaggtattaaatgacaagtggttggtctgttagctccagtgatttttgaatagtgacgaacatcaatgatattccaaaatagctacaacaactctaaggcagtaagaaaatatctgagatttcaatcagagacaaagctgcaggtcctgcgaatgcagttgagattggttgcctacatgcatagtggaaaaaagggcaccattgcagtgagagcttagaaaaaccccattaggcccatggaccctaggttaaacactcctgatctgaaaggtcctgtagaagctagtcctagttactagggctatcagtgaccccagtggatattgaccccaatggagattgttcaagaccagtggaaagccacatgctgatggggtggctgttcagtttgttggcattaaatagagctccttttaaaggggaggtaaagtagttcctcctgggaatcttttttcctgtcttaactaggggaggcatgcacacctgtctgaagcatgaagtattgatctttgagcagctcaatgatcatgggaggctatatttaggctgggtgagacccctgttatttgctttctttgctaccttatttgacctgggacctacacacgtttgactttccaactgtgcaaaatggatatatcatcaggtcaaggttgcaaactctggcatccatggggccaggcagggggcatgtacacatgaggggagtgccatcagtgggaaattggagaccatgtggccacctaaagggggtgatggacactcagccccagccgaatggtgccctgctggaaggtgagcctagttttgccaatatcgtgagttttcagataagcaagagattgagagctttagataaagctaccatctacaatattggtggcaaattctgttttgttttgttttgttttgtttttatagaagtttgcaggccaaacaaaaatatatgtgggtcacttgccatttctggttttggtacctgtcatagcaggtacaagtgttattacagcattttcgctaatctctcagtgtatataggaagcagcttttcagtttatatagcacttttgttttttgaaagaaccacatagaagcagtttgatggagtttttaaaaagtcatgttgtttagcattatttgcaatagccaaaaggtgaaagcaacctaagtgtccattgaccgatgaagggataaacaaaatgtgctatatacacacaatggaatattattcaccctcaaaaaggaagggaattctgacacatgctgcaaggtggatgaagcttgaggacgttatgctaagtaaaataagtgagacacaaaaggacaaatatgtatgattccacttatatgaagtatccggagcagtcagattcatagagaaagtaccgtgatggttgccagggttgggggaaggaagaaatgggttcttcaatgcgtgtagagtttctgttttgcaagatgacaaagttctggagacggatagaagtaatggttgtacaactgtgtgaacaaccttaacactactgaaccatacacttaaacatggttaagatagtaattattttattttattattttattttatttttatttatttattttttttgagacaaagtcttgctgtgtcatcaggctggaatgcaatgatgcaatctctgctcactgcagcctccacctcccggattcaagcgattctcctgcctcagcctcccgagtagctgggactgcaggcgttcaccaccacacccagctaattttttgtattttagtagagatgaggtttcatcatgttggccaggatggtctcaatctcctgacctcatgatccacctgcctcagcctcccaaagtgctaggattacaggcttgagccactgtgcctggccattttgttaaactttaagatgataaattctgtcatgtattttaccgtaatcttaaaaaaaatttttttctaagttatattgtttaatgataacacatagaacagagctacaggaagaaataaacaccagaaagggtaatgtatggttaatacgaaatcattagaccatttaaaacaattggcagtagcttacaggattttaaaatataggtaggaataaaaatataacagtacacaaaaggtaaggtgggcaaatagagttaaattattgtacagttcatttttaataagtggtgaaattaccaatttaaggtaaacagtaataagttaaggatggataattagaatcacaaaaaggataagaaatcatgaccaaaaagatagtagaggaggaacaatggtgtaatacgattccagttaaatcaagttcaaatacaggtaaaactgacagagtccaaatagtggctagctttgggggtggaggtggacattgactagatgagggcacaggtacaccttttctctagcaacgtgctggcgatatgtctttatattactgtggggagtggttacacaggtgtttacatatgtaaaattcattcaactatacacctatattttatgcattttaccgtatgtaagcttttacctcaataaaacagaaaacagtaaaaattgaaaaataactttttaactaatagcttaagacaggggtcagcacgctactacccacaaaccaaatctagctctccgcatgtttttgtaggactcgtaagccaagaagggctttatatttttaaatggttggaaaaaatctacagaataatattttgacatgtgaaaattatatgtaattcagatttgtgttcataaggaatatcttgttagagccacaaaaaaagttatattgcttaaatgtaatttctttgtttctcagctaataccactcgaatattccaagggaccagaatagtgaaaacaggagtggtaagtagagaatgggaaattgctttgtcgtggctggttgttaatttgcttgcagttaaaactgtcaccacgaagtggcagtataatgttgttaaactgctcagtgtaaagcggttatagtagagaaaaaattacattattcactttttataattcagtaccttatgaacacaagctgtgcaacagtgttaggtggttatattatataattttgtgaaggtaaaaattcttcatatttttagttatgatttgtgggatcagacgatgcaggaccacaaaggagttaaatctgttccaaccctttcatttgacatatactcaaattcagaggttgtcatttgcgtaaagttatatggatctgaaaatttctggaaccagaattaatatcttagtttccccattcctggttggtataatgaataattaaaatactaatcacagcagtggtgataataataatagcctaaaattcactatgctcttcctgggtttcaggcacagattattttatttacttctccaggcagcccacaaggtcagtgttactgttgttcccgttttacagatgaggaaaccgaggctcagtgagttaaagtaatgtgtccagcatcacccagcaggcaagctaaaattagactaatagctcagagcagcacttcttgttttcctaagataccttatgtgagtaaaacccccagacttgagccccagtttagtatggtggtaagaacaagccgagtcttagacccaggcagccctgcatttgtgccttccaggtcatgtaccttgtgtaagctctttaacatctctgtgtctgagtttcctcacctgcaaaatggggtgatgatcatgcctgcctccagagtagcatggaaagccctggcacacggttggcatttgttaattggaattcttgttattgttgttgatgttgttgtcatctgtatgggctcagattttcccacggatcaacttagaaactgcaaggtacagtgactctgcagtgcccaacatggagatgcagagatgtaaaccagtgcccagagcatgcagtgcagagcatggctcctgcctctgaccctgtcattgcagacctgggcaggctgctttccctccttgtccacccacttcctcactgggagacagtggggttggactggatcacccagtatctttccagacctagagctgagtatctactcaagtgtcagtgatatacataaaatcaaaggtcttctgcctctcatcaccccaagaacagatgaccatctgatttttccagttcatgacttctttgttgtgtaagtcagctttaacactacttagtttttttggcacctagcctcatcttgggtaatatcagtgaaaagctgagtttgatcgactagttatgcattttaacatgttcacaattataaaaccattaaaaataaaagttgatcacccatggaccacctaatgtcaactttatgccatacattggaaaactccatagcatagatgagtaaaatcctcagagggtgacaaccagggcctcattcccaatctcaattactgatgcttctctgctttttcttcttctgcctcttttccacccttgccgggtgaccctttccagcccacagcgtctcctgcctcttcagccgacatggcccccatcagctcggggtcttctacctggacgtcctctggcatcccattctcatttgtttccatggcaactgggatgggcccctcctccagtggcagccaggccacagtggcctcggtggtcaccagcacgctgctcgccggcctggggttcggcggtggtggcatctcctctttccccagcactgtgtggcccacgcgcctcccgacggccgcctcagccagcaagcaggcggctaggccagtcctagccaccacagaggccttggcttctccagggcccgatggtgattcgtcaccaaccaaggacggcgagggcaccgaggaaggagagaaggatgagaaaagcgagagtgaggatggggagcgggagcacgaggaggatggagagaaggactccgaaaagaaggagaagagtggggtgacccacgctgccgaggagcggaatcagacggagcccagccccacaccctcgtctcctaacaggactgccgagggagggcatcagactatacctgggcatgagcaggatcacactgccgtccccacagaccagacgggcggaaggagggatgccggcccaggcctggaccccgacatggtcacctccacccaagtgccccccaccgccacagaggagcagtatgcagggagtgatcccaagaggcccgaaatgccatctaaaaagcctatgtcccgcggggaccgattttctgaagacagcagatttatcactgttaatccaggtaagtggtgcaggtcttcttcgagggttcctgctcctgtgaatagtcgtaccctttttcaaaaaattgggagcagaaggtgaagcttcagaaggtacttaatattcttagaatcatatatgtctgtcatagaaaaggtgcacacatgtgaaatgtgtatgtgtgtgtccctgttttactccaaaagcctactctcttacgctggagtaagtctttctttgatatttgttttcttgcctcggaataactccagggacttcaaccaggcaatgatatacatgaataaaaaaagccatcgatcttaagaagtttatttattaagatttcattccatattcattatataatgtatctacaaatggctagtttggtgccagggactgggcagggtgctgtcccaggggatcctagtccctgcctaaaaagtttaaaggggaaggcagacagatgacaagacagtagctagctggagcgcatgcccagaagttaggtagcaggaacgttagaaagccagcaagctagatggtggttagtcggcaagctagatggttaactggcaagctggaaaactaactaactgaagttttcgattgtgaaatggtaatagaggaaataaacaggatgctgtccaagagaattatggagaggatagggacctaccttaattaagaaaggccactctggagaagtggcttgttcatggaaacctacagaatgaaaggcttcagcctggggagagctggtattggcccatggtccttgcccaagaaatacggccctctctcccagagctcccattgctgtgggaatgagccagtgtatagacagtgaggccagggcatgagatcctcatctcctggtggcaattttgttgctctatcatatgctcaaatcttaatgaaccatcctgatagtttctgcaagggagccataagcatgaggagttgttattgttgtgagggcttttcttaataagaaattcttcattttgccagactacaagatgtttagcaacaattttttttgcgtctaagctgttgtggagttataagagtgcaaaaaaaaagcaactggtaaatatttatttgcttttgcacttgtaaacattaaaattcatctaaagctgagatctcgtatgttaagatacaacttagaataaattttcatgttttgaattactttcctcttaaagctgctatgaactaattttttgaagtgggggtctcctgtgggtattgctcactttagctgtgactgggggaaaggtgcagagtagccttttgtggaactgagtgaaggaaatgtggggccacttgggaagctgtttctgtaagaacagtgacattccctctaggaattactttgaaaaagttgaatttcttgcatttgaagacgctgaagaaacatgtacggaatgcccactgtataagaggcaccaggctaggctttggcagtagaacataggtaacacagacttctcttctcttggggtttgcattctggtaggggagcttgagaatatgccagtaaacaaatacatacccttaagtagccttaattgctacagttggggagcggagggacagtgtagctctgagtggtcaaggatgacctctgagcagagagccaagtggtaagaaggagctagccatgcaaagatccagggaggggaattctgggctgcaggaacagcaggtccagagaccctacagtggggaattaatttggatcagttgaggagctatcaggccagtgtggttagaccagagggagtgagggggagaggaggggatggatttagagattgatggaggtgctctggaaaggtactcgttgaccacgctgaggatttccttctactagaaatgagaaaccagggtagatcttggctgcagtgttacttgattgattttttgaaagacctctcaggcctctgcgtggagatgatataggaaggcaggaatggatgaaagaagcccagttaggaggcagtggtaatggtggcttggaccagtgtgttttctatgaagacaggtggtggacttggaattgactttcaagcttgagtgttcagcctctggactatgggctctggcaaagtagcattctcagcctgctcctcttaaacatttgtttgaccacattcctgaaaaatgtggctgctgagagcttaggctgggagtatttacagtttgagagatgggagagaggcagggactgggaccgccccaggtaagtggaaatgagttcttgccattggagtcaggttccagattccagagacaggggagaagaaatggatggcaaactttgggggctccctactccaggtatgaggtgtgtaggtcctcggcttccaccctacagaaatctgagagcatctacaatcttggcagagtggctttgggagtcagatcaacccagttggctctgtcccttattcactcagggtcctcaggtaagtcttagtcccgtgtcctcgtttgcaaagtggagctaatgatcatgcttaatgccgaaggtggtgtggctgtggagaccccctcactgtcactgacaaataggagctgtcagcagcccaggtgccacacaatgatggtgactgtgaggaggccccccacagccctttcctttgctattgtctgtggacattaaagctactggtccccaagtaactgccattaaaaatgacctccagatggccgagtgcagtggctcactcctgtagtcccaggactttgggaggccaaggagggtggatcgcttaaatccagaagttcatgaccagcctgggcaacatggtgaaaccccgtctctagaaaaaatacaacaattagcagggcacagcggctcatgcctgtagtccagccactcgggaggctgaggtgggagatcacttgagcctggaaggcagaggctgcagtgagaagatcacaccactgacagagcaagactctgtctcaaaaaaaaaaaaaaaaaaaaaaaaaaagaaggacctcctcctgaaactcaacactggtaaatcagagctttcccttatcaccttcagcaaagtgagaaggtccacttctgaaagctaaaaaaaacttccttgaaaatttcaagcagttcaagtctgaaaatggtggtgatgattgtttaagccagatataagcaaactttttcagctaagggccagagagtaaatgtttttcagttttgcaggccacaggtctctgctgcagctacttaattctgccttgtagcacaaaagccaccatagacaatacacagctgagaggatgtgatagtatttcaattaaaactttgtttgcagaaacaggcgatgggtctgatatggtccacaatctgtcatttgccaacccctggtttacacagaaatctgcatgtgcctgttgattagtaaaggacgtgagtgacctgaaggtaaaacaagcaaatcccacatcagtcaatgatccttcaggtcttgcttcacttccattcaccctgtcctttgccctgtctgcctcctccagtatggtatttattttttaatgaaatcgccatcattttaatgttagtgatttattttaaggactttgtgtgtacatttgctttaaatctgttacacatttattttttcttcatattaaggaaaaacaattactttaatcaatacctggtctctgaaaagagtgataatgtgtaaagttacacactgttatatttttatgagtatctccaaacagcttgtttaaatccctttggtgtttcataacatatttttaagtcctgtgagtagtggctttaatatattatctcccagggaagaagaagaagggaatccttctatagaagaagtggcaaacccagacacctacagaaaccagttaatactaatgagaaacaaggaccaggtgttagacattagggagtggtaaggactgcagcaaattaaagagcacatgacttttctaaagagggccatctcactcagctccaacagattactgccagtgagaatgcctagtgagccagaaatccaggtttttgtgcagaaccccccaacttttaagtaagctcaaatttttaaaacaatttctgctttttaaaaatgtaggccaaactaaacccatccctgggccaggtaggaaccgcgggtggtcaacctctactgtagtgttgattgctagagttgcaacttcctgagaagcctttcagaaggcttgaaggcctaggtgtactccctccctttcaccaggcttttttctagcgtttctttagtgcaaagccctcagctggatgtctgctacatggaaatccagcatgtggtcccatcctgaggagccacagcgtgagcccagaagccaactgatgcaatgaaatgttcttgggggtactatgcagtacagcataccctacaaaaacatttcagagtgggcatcatctacaaattcatcatttggtgctgggattttccatttttgtttccttaaattagggaaactcttttttcaggttgaatcttgctcagaaactcagtatgtgaacactcattgctgaaggtttactgactgcatcttctggctcagccctgagtcaggtgctaaggggacattccacttcaggggtcggcataccacagcccgcaggccacttccatcccctggcctgcatttgcatggcccatgagctaagaatgaacacaattgggcagaggctctgggctgctattctgctttgagacagagtggagggtgcaaagctgcagccactctgctcctttgggcaaaccatgaggcgcctctttggaactcttaagcactaaggaactcaacgtgaacacctttaattacagaaataataacagcgtcaccagtgaacatttgtgctagccctgcctatgcagaaggccagctgcatatgtcactgatcctagagtactcccatgaatgtcgtactttgttgctgtcatgctggtgagggaagcgaggctcagatgaaggaacgtgcccagagccacacggcccatggcaagacagagcccaaatatgggctctgactctatagtccagggggatcttccccatgtgatgctggctttggcgccagttcccagaatgagcaatgccagatgatttcagatgcagtattaattaagtgaatattttaatgtgtgcttttaaaaagagactaactttccattggtgacagtggttctcaaccagagggaattctgtccttctccctaggaacatttgggagcatctggagacatttttagttgtcataactggcactggggtgctacttggtgtctcgtgggtagaggccaggcctgttgctaaacgtcatatggcgcacaggacagctccacaacaggaaccatctggtcaaaatgtcattaatgccaaggccgagaacccctgatttatagtattcatgtaaagtttccttattgaagaagtttacttgaggacaaatagagtagtaatttaaagacaaaaataagtaccagtacaggttcatgcagatcgggcagaaatcatgaatgcagtacccagctgtctagggattgggagcactgcagcatgctttatttaaaattagttacatcaggcacttgtaaggactatcagaagtacttttcagccagtgctagttttgctcgtcaggtttctttctagagaaatgttttctttataattctgcccacccccgtcctggtctgtcatcttcctggcatgtccgtgggaacaagctcagggtaggccgaaggggttattcagctgccagtatggtttagtttcttctcagaaagtatctgggtccttggagtttctattgcccactgaacgatctttgaattaagacacatggtaaatctcatggtatggaaaaccagaccccactaagaacaattagatttccggagaggttggagtcaagaattcaggttgcagcaggtggcatatttggtataagattggtgtacaacttctgtccgtgactgatttcagaaccacgtactattgcaaccaactgtcagtggtggccgtctgataggttagggcttgccgtcttttaggggcttggaattaaattaggatttatcaaatgcctccccactttcccaccacctaattgaaatagagatgacagaccatcattttgattgtttgagtctggtgaattaagctctgcatgaaatggtaagggagcacttattcacaggaactcttggcagtgatataaatggaaacgaatgatgctctaatcctgcccacacgagttaacacagagccagtgtcctgttgcaagagaacatatttatttgtaactgatgaacaatcatttctctgcagcagtggtttgggtaacgtcagggctccagaaaaataaaaggccagttttgtggccctgtaaaaacagcagccaccttatcatttcacacccgttagaatggcttctatcaaaaatatagaaaataaatgttggcagaaatgtggaaagaagggaaccctttgtgcactgctagtgggaatgtaaaatgtgcagcccctgtggaaaatagtatggtagttccttaaaaaagtgaaaccagaattaccatatgatttagcagttctacttctgggtatacacttgacccttgaaaaacagtcttgaactgcttatatccacttatacacgagttttcttctgtctctgctacccctgagagagcaagaccaaccccttttcattctcccctcatcaacctactgaaagatgatgagaatgaagacctttatgatgacccacttccacttaatgaatagtaaatataaatatgttttcttccttaggattttctttataacatttttttctagcttactttattgtaagaatatagcatataatacaaataatatacaaatatgtgttaactatttatgttattggtgaggcttccggtcatcagtaggctattagcaggaaagcttttggagactcaaaagttatacatgaatttctgactattcagggattagcacccctaatgcctatgttgttggtgggttaactgtatgcccaaaggattgaaagcaggatctcaaagaggtatttgtagacccatgttcatggcaacattattgacaatagccaagaggtggaagcaacccaagtgttcatcaatgagtgaatggataaacaaaatgtggcatatagtacatacaatgaaataactgtttagcctgtaaaaggaacgaaatcctctcacatgctacaacatggatgaaccctgaggacattatgctaagtgcaatgagccagtcacaaaaagacaagtaatacatgattccacctatatctagcatagtcaaactcaaagaaacaaagtagaatggtggttgccagaggctgatgaaaggggaaatggggagttgtttaatggatatagagtttctgttttgcaagatgaaaaagttctggagatcagttgcgcatcagttgcacaacaatgtgaataactaaacatcactgaatgggacacttagaaatggttaagatggtaaattttgtgttatgtgtttttccactatttttttttaaagcagccaccttaattcacagatgtgggaggtttttaatgagtggtatggctcagaacaaatatgttgaaattccccacgatggaaacaggctataaatttataagtatgcatatcgtccttctctttatcttccttgcaaattaaagaatcttgctcttccctactcctgatagaggcctcttggatccaagctagttttagtcttgacaccagagcggttcttgtcctgtagcagaagttgagcccttcctggagggtaggaggcatttcagatgggtccatctgatgtattgctgccggtagcatttatagtacattgtactccgtttttatttgcttctactgggatgagagccaagccagtaaaaggcaaacagcattaattcagtgatgacatatgccactgaaaactgtttttcttttcttttttttttttaatttttttttaaaaagcagaatggaggcactttactcagattctgctgggtgctgaaataaagacggagagaaagaaaggctgtacggagagaaagaacggctgtggggaggttgttaaccttaccttcctcctgcatacgctcagagagggttcgttagcattttgctccaagtttcatggggaagacatttcaggagcaggctcattctttgagtctgggctctaactggcctcacatcaccctctgagtagctgttcacctgcacattacatccactgggggagtactgggtatcagttgatactcctttcctcattgtcatcttttctacacacagatccaaatgtgctgaggagaatggactatgttatatgggcagagcaacagcatggttagtttctaattggcctaaaaataaaatctcttcaaaaataaacagaattggagaaagctgctttgtacagaaagagcctcttctcttgagccaggttattggtatcaggatcatggtgagtttattaaaccatgatttttactttcgtttttgaggccttttcaaaagacccgagttagtgttgttctgcagactcattgggtcagagtgccatcttgcaaactgaaaccaggctggccagagtgagcttgcagtgggagttgggagtgaggaaagctggtctggtgtgacattagggagtagtgacgactgtggcaaaccagtgagacgcaccctgtctgaagggagtgtgccgcttggttccaactgatgtgtgccacgtgggaattcaggcttttgttgccaaccttgaacatttctagtggaagctaccattgctgatttttatctgaattcctttgcttattaaatgttggtagctatgtcacaattaaaaaataactacttggaaggggtgtcaaaccagggttgccagttcataacccaagtcaggcaggaattgaagggctagtcctgctgggaaaactacatcatctggatgaaccagagatggaggtgaggaggagctctgttaacccagaggtcctgtccttatcttggtgtcacaatttgggcatcatggagggaagcaaacccccagtaactgggcagctcagttctgctggacccttcaggaggcagctaggttaccagcaaagctccgagtgaaagtgtgctgctcctgacagaggggagcatctagtgttactaaactgtcagaattgttgtttggctccattgaaggaaagaaaagaatgaacatttcttgggcacctcctctgtgtcaggcactgtgcttggtacctgactgatccagagcagcttcataagcaggcagcctgtgcactcacacaggccctgtgctcagaagggcctatgcttgctttcatactgtctcatactctactgtcaccttctcaaaactcttttataactttcgaatgggccccatgatttcattttgcatttggtcctataagttacatagccataacttacatagtctgttttcacacggacgatcttttttcatcctcaggactccccgagaggtgagtgttaccatttgtctccctttgatacaggagtgaacagacactcagagatgggcatttacccaaagccacacagctggaaaggcctaagtcaaaatttgtactcaggtctgcctgagtctggggtgcagaattgcccatcttgtggcacgctgcagctgttgtaccgaaaggcctacagcatgttctggtctctggaggcctaggcatggggaagtttagcctcatggattgtcggtgtctgagggcatataatgatatgggtgtatactcagggccacattttgtgtgttgtagtagtcctagcagcttgctgttttattagggccacaaattgagtcagggagcaggacgggtatttcttctgaaggacacagcaagaagtacgggggccgtgcacagtggctcacacctataatcccagcactttgagtgggggctgaggcaggaggatcccttgagcccagaagttcgagaccagcctgggcaacatatcaagaaagtgtctctaccaaaaaaaagagggaaaaagcagtatgatacagtctagtctcagggcaaactgagattctagctctttaccagcaatctcatcataggcagccctttgtgctgatactcagcacatctgaagttctgtatgactgccacttacacactcagatgttacagagaggagtcagattcagcaaacacccggtgagtgctcaccatctcctgctgctgtgtgagggtgctgaggaagagagtggtggtgatgataagtaatgatgctgttgctaggatggtggcgggtgatggtgttgccgaagctggggtggtggtgatgacaataatcacaatagttaacattaaccaggtgccaggcaacattctaagtgttttgtatgcattaactcatttaatcttcatcccaccacaatgccgtatgcaatattattacttccatttacagaggaggagactgaggcacaacgaggttaggttagttgcccaaagttgcaaagctagtaggaggcagagctttgtaactgttcttccatacacagacggaaatcagccctgcctttggggacctagagtaacaaaagagcgattataattgagtatgatgtgtgcagtaagagcaacacaagatgatgatagtggtggtggtacttgtcatttgcttgatgccaggcacacttctaggtgcttacatgcaccttctcattgaattccccaacagtcctatgaagtaggctcttttcatcccatttgatagatgaagaactccaggcccaaactggtttaagttattggttaaaagtcacacagaaaatggccaagccaggatttgaacctataatctctgctctgcccttaagagatagtacaaactggcggcttcgggaagcctcacagagaaggcagcatttgaaccaggactgaaggatcaataagatgaattctggcatcaggaaaggaaaggcactccctgcagtaggaatgggaggggcaaaggcagagaggcgggaccatggctcagcatggtcactgattaggtgagtgtggctggaaccgtgacagggaacagcaggagatgatgctgggttggggatggaaggctctgctcctgaagagccttgctttccccactcaggggtatcctgagggctatgaggagctacttaggaaagtgacaggagcagatttgacttggtcacctggagatggaatccaattccaggttcctggcaccaggaagacaaagcagtattgtgaatttgaaaatgaaatcaactttatcatgccccacatgaaaattcagtcgctcttatttttgcttggcttttatgtaaaagacccaagccaatgaaactgcctgccattagtcaaggtcagagtgaaacttgtcagaaaaacttccttaggtctctcactgacactacaagttattgccaacctgagagctcctccacagaaattaccatttggagactgtccacagtgggatttcagataggctccaaccccctacgggaaccccccccccccgccaattattacacactttcaccaaatgttagagggagaaatgactccattgtggaaatcaagtttgagcccagctctgacctgggctgtgactcaagagccttgtcttcaggaccttcattctctctctatgctggtggttctcactttttctggggcctgaacctctctgagaatctaatgaaaactgaacactcaccctgtagaggaggagagggggacagacattatcaccaacacagagatgcccctgtggcttgagggacgatataatgtgccactgatccacacaaccagatggtcactccctaaccccttcccaaggccgagaaattctggagtggtcacttttcactggttttagaatggctgaaatatgctgggcgcggtggctcacgcctgtaatcccagcactttgggaggccgaggcgggaggatcacttgaggtcaggagtttgagggcagcctgagcaacatggtgaaacctcgtctctactaaaaatatgaaaattggccaggcgtggtggcacacacctgtaattccaggtacttggagggctaaggtgggaggatcgcttgagcgtgggaggcggaggttgcagtgagccgagatcatgcactccagcctgggtgacagagtgagaccctgtttcaaaaaagaaaaaaaaaaaaaatgatagaaataccacagaggtggtattgccagtgattgtttagggatataagtgtgagggactattttggccaagagttcctttctgtggttcgggatgaataggacatggagtttgcattctttgtagcagcacaggcaagaatcctgttctgtaaggagtgaggagaggaataagacactgagagtccctcctgtacccaagggcttcacagagtggatactgattttaactgaacatgtggcctatagcgtcaaccctcccaacattgttttccattaacaggacatccaggtctttgagattcccccccctcccccaccagccagataattgcctggctgggccacccccttctgggaccccacaaaattattcttatttgcaactctggttcctctggccagccaccagagctctgctataaaagcattatgttgatggagagaaggcatgcctgatctttgtctgctttggcttaaaaccctgcagtagtttctactgctcttacgactaaattcagtttctttatttcagcctaaaaggccctggcttcatctgccttccaattccccatctgggtcctcctccctctcattcttgaactcccactgatttgatggtctccgtgcagaacacccttcttccccaactctctgtttggctaactccccttcatccttcaacacttgccttcgttggggagctcatggagacctgggcttggagagctattcccctatggccccctgtgcttcccctggtgccacattcattgcattctaattaattgttgttgtgcctgcctctccccatttaaaagattcctccccatgggtacagcagtgctactatctgatgtactgatgtgtccccatcccctcgcaccaggcctgtgcacagtaggggcttggtaagaatctctcctatctaatgaaaaaatggagcagggagttaggaaaatgggcaggcacagctaggaaggcactttataaatggcaaagtgctctgtggaggtttttaatcagagtgtgctgcacctacttgactctgtcttcttacctgtgagcaggggatacatcaggtcctgtctgcgtcacaggcctgtgcctgaaacaaaggaggtggtcaacatcaaatgcattagaggaaatccagtgaaacgcatcgtaacacacttcttcctgactcgggagtcttgcctctttaaaaatctgctcccatagccaattctttcttccctactcagcctaccttctctcacctggaaactcaacctgattagctctgcatttagtccatcctgcagagggacactccgggctggctgaacgctggcctcgtttttgcagtgcaggaggaatccttgctgggctcaagtcagcctgcagccaatgttagatttttttaaggggcttctccctgtgatcacaggcaacctttgctttttcactgcttgcctctgtgcacctgtgctcttcccagccccagcaccccaaccagggcttcatttgggccacctggcatgttccgggcatcttcttcacagtggaagggaagataggatcttctgctgaggctcctggggacttctgaagacattcagggcctggagaggtggaggaaggagctgcctggttaacaggtattggccgaccagagagaatcctaaactatttggcaagctttccctgctaacctttagattgtggctgctggttacagacgtgctctgggaatagggtgtggtatggcttcctgtcttgggaaagaaaataggagcttttggaaggatctggggtaggtgataggatcaaaggacaaactggagaagcatattttaggaaaaacaggatctctggggatctgggtggtaggagcccacggacagaagcacctaggtgctcctgctgggatgtgctgttgctcagtcttagagtcggtggttgagattctagggcaagatgtcattgtcctggcttgagtgctaaatcgttgaccagagcagggagccccacactccgatgattgtcccaccatgactgtgtctgttagggaaaggtggtttcccaaagcagaattggggtgtagttgttactacaggaaagagtaagggatgctgagcagcaaagaatagatggccatcgtagtcacagccagttctcctagttatcctagtgaaacccatcatgccagccctcttgcccttgccctagagaacctgagaggctcttggacagccattccacccttgcttctttgagacttcagcacatgtcctcagcacattcaaaggctcttctgggtcggtcatgttcttggggtaaggctggaatgtctatgtcttctgtacagctgtctaaaaacaccttcaactgtatctgtaaatccatataactgccaattacagaatgcagcccatagaagaggccctgtgtgggttgggatggggcaggaaatggtgagggctgcggattgcccctcctgtcatggggcagctcagagcaaatggcccagttcgccagaaaccacacaaaactggaacagaactctgcatcaattctggctcccacctccactaacctctgtcctctaactgggatgatttctcttggcagcggaaaaaaacacctctggaatgataagccgccctgctccagggaggatggagtggatcatccctctgattgtggtatcagccttgaccttcgtgtgcctcatccttctcattgctgtgctcgtttactggaggtaagccaggcagcacctacagcgtagatttgggggccagatgctggccaggttttgctcacgggaggggaatcccacggcctctgcattcaggaaggtgaggtagcttaagtgtttctggtcttgccacccggaaggccatcttgtctctgttagatgatggcagggccagatccacttttgaggtcaaggcatttatggtaagcttctgggatttagtaccaaagaggtttttgtttgagaaccagggagatccaagttcagatccaagctctgctacttgctagatccaaatcccgtgtccactttgattgttagtttcagaaccagcaaaatgagttaacaagtcatagcatttgcagtttttctgagatgatgcttactttgttgtagtcacataataactcctctttaccttagaattttttttcatagtctttcactgaaaattaaattgggtgataggaaaacatttagcatattatgtggtatttaatatatgtaagattaaaatggcagattgtaagctatccggattctcactgcttctcatgggaagccaggttgcagcctctgtttagaagttgtgttttttcagccggaccgtctcagccagctcagctgagcaactccgtcaagcccactcgtttggcctgggtgccctcacctctcagactaacgtaggaggcttctgccctttatctgacaggcttcaccagtgagaaacaggtgtcatattttcatctctccctcccttctttccattcactcaattttgagcccacactttgtgccagtcttctagacacaaatgatttctgaagaagtgagtaaaacagataagaatccttactgtcatggagcttacagtttagtggaggaggcaggcaataaacaaagcaaataagtaaaacatgtaatttctaagatggtggtaactggataatggagaaagcttaaatctggaaaggggaggggcccatgggggcctagcaggagtgttcagagtggtcaaggagatgatacctgagcaaagacctaaaggaggagggaaccaaatgggctccacctggggcaagttccaagtagaggaaacagcacatgcaacggccctgaggcaagggcatgcctggtgtgcaccaggaacagccagaggtcagtggggctgagacgtgaagacaggggtaaggtggcagaaaagggtatcagaaagaaacaaggtagagcaggatcgggtcatgctgcacagccttgtgggccattgttaatgcactgcctttcactcgaagatgagtagggtttggtacagaagaatgttatgatttgacttgaagattacttggctgctgtgttgaatacagactgaagaggagcaggggcagaaacagagaccatcggggagactactggactagttcaagaaggacacgattgtgtctcagatgagggtagccgtgtaggtggtgagaattcattgtgtatagatctattttgaaggtgggagcaacagaatctgctggcagattgggtctgttcctaattggctggaacagaagaataaggaaggaggtcatctcaggtttcctcgggcgtctgacggtaaccataagccctttagtgctgcagaccagcaagtttatgaagtatgttgtattttggggtgagcataggaacactagactcaccttcatgtcatcccttctccaggaaaaagtattgtgcaaatatgtttgaagcccattggtaaactggaggccacctagtgtgagtttaactaatcaagtgaggttaacaaggtcagcatgcctatctcttggctctgctcagcactgtttggttttagtctcagactgtcaccacaggggagcagagaagtcccacagctgccacagcataaagaaacactttgtacccagcaattctggcaaaaccctccagattgtttctgactggcccaccttggatcctctacccacccctaaatggatcacagtgaccaagaaggaccatggggccaaacaggcatcaatacccagccagccaaaacatgagtatttactacaggtttcttatagggaagggctgtgtcatgtagtaaacagctttaaaatccttccattcaagatgtattttccctttagaaaatgacaactgtttatacttctgaaaatctcagtgagtccaaatggaaaatatgaattgaataatatcttaatatttcctgtctgaaatatttttatgatgtttattatacatgtatgcatatatttcatcaaaagcttcatttaaagtaaccagagctttaaacttcatccaacagagtctggacttgagcttttaccaaattcctactcccagtagcacaaaaaatgagtgtgaaaaagaaaattcttatagagcaaggaaagtaaaattaaattagtgttaggatgaatgagttggctaagcatacagcctagaggggacaaggaccttttttctgtccaacttttaaaaaattattattaatgcgaaagaagaaagcattggggagctcacatagaaaattggtaaatacagaggagacatgcgtttccctttggcaatgcagttttttagctagaacaacagtgcttttcttctgccttttgaggcacagtaagactggatgattggcaaacagacttgacataagtagagcattgaggcagatcaaaaccttctggatcatttcttcaggaggcaggcctggcaccggggggttcaaacctgctcactgtggcagcattttctaccacaaccaaggaatggccctttgcagttattctgatttttgagtgtgttttctccaagttgttgatactacaacttaataggttcatgaaatagtggaaaactacactcaaggtctctgaattctgtctcttccaagtctcccgctgtacagtggtgttagtgctaatgttcagtgagtccttttgagtgccaggcactgtgccaagcacttgggtggcaccaactcatgtgattctcacaacagatctgtacggtaggtactatcactgtcctttctatttgacccacattctttgaccaaggaagagaacgagaactcacatttgttgaaagcctgctatgggccaaatagttggcaatatcatcaccagaacccttttgttgttcagaacccttttctattgcagttgacaaaaatccatttcaaaatgccttaaagctcaaggggaaaaaaaaaagtttgattcatggaattgagaagttcaggagcattgggcctggctgaatttgtaagatggaacatcaggacttggctggtttggtctgtctgtgtttctcttgccgtcagtttctgggatttgctgtctgtgtggtcttctcgctcaagcaggccctctgcctgtttgtacagagcagcctctggccatgttagacttacatgtctccaccccagtgcaaagggaatctttcttctctaatagttccacttaagtcccaacatggcatctcttattactgacttctgtcatttgtccataccccggagtcgtctggtggccaaaaggatggaacattcttgtcaggcctaggtcttatatttaactctggagctcagaagtaggatcagtaccattgccatcaaaaccttggactgaagccgaacaagggatggctttccaaaggaccatcaagacctaaaaaagtgagtagaaggttcagctaagtattctgttacttaaaaaattataaagctgtttctattgcatgtgcactggagccattttcagcttcctattatttatgcaatgcttacagagttcctgccatgcatcctggtgggcctagagatttagagatcaggtcccttggccctcacagtccattggaagaggcagatgagtaaatagaattgagtatggggagtatttggagaaggataaatccaagttgctataacagcatataggaagggcttcagcccaacctggaataggggttggggtcagggaaagctccctggaggacctgggccttgaaccacaaccagctgtcagccaggtgaagagggtgtggaagaatgaggctggggagaaaaagcctggcctactgcaagcagataatgtggctcagtgttgttggagcagagtgtggggacagcaagggccggatcatgagggcctcatcgaagggagatgtgccatatcctgaggatgatgggaaggtattgaaggagccaaaactgcaggagggcaagatcagaaagaaacactactgtgtctagagactgtaacacgggcctatagtcacatagcctggatttggagccacactccaccacactgtttatctgtgcagctgtggagcatgtgttcctaccagcagtgctgtcatctctaaggtgtgaatttgttttggggagatttttataaacttattttgtgtataaagcacagatttacatatacataaatagcattgtgcattcgtggtattaaaattggcactgggcaattgggggggcggagtctaaaagggcccctcagaggaggtgccaatgaaaaacaggttgagaaacactgctttagacaaagacttctccaccaacttcggtttcctcatctgcaaaatatagttaagaaatgggccacaagttcacgtgaggattcggtgcaagctatggaaaatgcttgtcctggtgcctggcacatggtgaatgtgaggtagtgttataccagatctgactttagggaaaaatggaaaatgtaactctgggtcctggtatgcctcaaatgaagtttttttttaataaggaaaatcaaatgtacagagctaaatgaattttgtcctttaaatgtcatcacattgtatagctgtacagagtttccaatatgtccattgcatacaacatgcttgaaaataacttttggaatttctttctagagttcattcttttgaaggatctcagttgtgcaaagtatttatcctagaaatagataaaactcatctgtttagagctaaatatagcataaatgtaggttaaccaactgagcagaaccactttgggccaaaaaaggaaaggggtgactataatgttaatgaaattggtttgggtgatgctcctaataggccttaaagtcaattccagaggaggacatccctaaataactgggttaaagacatgaccccactcccacccgcaaccccaggaaacaactctgaagcccagtggccagcctcattaattccaggttggctgtattagagtaagcttcattgatgttgcagcagacacaccctagaaccccagtggcttaataacacacaaaggtttatttcccacccacgtgaggtctgacagggttgagccgccctcctccaccagtggtttctctttctggaacacatatctcccaaactggtgtagcagggatagagaagttgaggaggcaccaagctctcaactgcttggcctagaagtggaacccttcactccttcattcaccactggccacagatggtcacacagccccaaggacacagatgaggtagggggaacacgtgggtatttgttaagcactgccacagtattcttaaatatttaaacccattggtatcattgaattatgtatatgtttcctgaaagggagaactttggagaccaatcattagtctgtacttaaaatttggctgaaactaaaaaccatgagcagaaacctcggatacctgtatgtctgagagacctcagacatcagtctcatcggggactatttgagcagtgtttttataggcagcaacatggatctgtggggagacatttattctaaaatgtttttagctgagctgtttcaggtaggacactatagttctcccttgaatgtccctcgcaaaggtctgccttgaagagctgtaggaaccagaatctgtaaaaacacagaagttgctataaaactaggaagaaatgtaagcaaagtgattttggacaaggggcagggttgtgaggcagataataaaaataaaatcaactaacagttacagctttaatggcaccctattgtgtgccttataaatattgcaatccatacaagcatgcagtggttcagagctattggaaataaggggaaaaaatcaattcaaaagttttcacagtgtgccattttggtctttttacttaagatggtagtaaaacataccttttgaattccaacagtcagatactgcattccaagagcttcgcatcccctgccttaccaagacaagctgtttttatggcaataatgtgctgacattcctgaaaagacttggagcagcacagctgctgccactcagagagaagaggaaaattttggaaggtttctttttgatttacataatttgaggttaatgctgggagaggagctatgggagaggagctatgtgcccggtgtccaatcagtgtgctagggggtgcaacttattagttgtgctgtagaatagcatagctattaagagccagacatttctgtctgcttagaattgtattacaaagatatttttagttttgttttttttttttctgtaatcctgagggatgttgcatagaaggtagttcttattgctctgatgagcaatatctcacccctgaaatggctttgtatatctgaaaaggctttgtatatctaaaggttcttaagcaaaaaacctttttttttttttttgagatggagtttcacttttgtcaccgaggctgtagtgcaatggtgtgatctcggctcactgcacctccacctcctgggttcaagcaattctcctgcctcagcctctcgcatagcagggattacaggcacccaccaccacgcccagctaatttttgtatttttggtagagacggattttgccatgttggccaggctagtctcaaactcctgacctcaggtgatccacccgcctctgtctcccaaagtgctgggattacaggtgtcagccaccacgcctggccaagcaaagaaccttttatgactatgtaccatactagacatgtgctcagcagattatacccccacctaattagtatacgaatcctgggaaataatcagtattgttatgttcattttgcagatcagaaaacagaggcttagtaagatcatgtgacatccccaagtcgcagcgttaatttttggtggattgtggatttgaacccagacaatttgacttcatagcccactgggttagccaatacgttatcttgtccagaggaggagtagcatgcctggtggcatatacttccctccatagcctacttttatagtgcatgtttatgtgtcaaaaagacactccaggaaaaggggatgtctctgctgctggacatggtgggagtaaactggtttggaaggccagatataaatcatcctttgttttggatttgccaaaatcatgtgaaagaaaacttaagaaaccaattatattttcaggtgttctggaagctaactagtggtactcactcagttacatctccattatttgagaagatttttatgttgaataatataacctatttggtcttagtcccagctgatcagtgctagttttcttgatattaaatgtttaatatcttattgaccataattctagcctagaaaaagacttgcaaaagtatagagcagctttacttctcaaattcagataggactgagctaactgcagattctggaacagaaaactggaaactccctaagtgggaattgtaacatctgacccaggtttgttaaaatttggtatgagaaggatttcacactctgatctggtagattcacttcagcacatgaccaagccatctgtaaattctgtggtaaatcagtcaacaccaatttagccacatatgcaaataggaaaaggtctctcttttactctaagtcccatctttagattttcagaaattttgccatgtgttggtgcctcctcattaagaatgctgttcatgaaaacaagtgagttttgttgacattgcaattttttttcttccctggatgttcagtgggagacagagtgtaataaatatgaagggatgcaaaccgcaaatgtgtgggggatttgtgttggcataatggaggctcaggcaaacaaacagatgcatgcgagagtcgagagtggcatgtggtaacacccctctcttgcttgagggatgactgaccacatgtgcctcactggaacacagatccctcctgtactgccacagtagcaacaatgacaccagagctgctgtgagcccaggcacatgttcttcacccatctgctctagcggccgacacttccaggtctacttgacgatgactgggtttttggtataggtgtttgtccccttttcaccccagcaaagtcacaaaggagacaggtatcataagaatgacttctcacatacaggtaactgtgaagacgtaggaaaggggaaacacccctgttaaccagcaataatagctgaattaatacaaagaacaccttatgttatttaatcctccagcagccatgtgtggtaggcaaggaatcagggactgcatcattcttgtcccaagagaggaaacggtttccagaagggggaatgacttgtccaggatcatagagcttgtaagttttagaatttctcagacttagggttttgggttttttgttgacctaaggccctttatggctggcctagttactcctttgttagttcattcaacatttcttaagcatctagttagttccaggcactggagagccattgaggggacagagttcctgcatttaaggggctcatacctgagaggaagagaggagcaggtaaaccaaggtaatcccaaatagaggtcaaaaactggtggcctccagaccaattttatttagctaacatgtttttttaaaatcttgaattatttagaaaatagaaagatgtgatgaaaaaccccagttatctggcttcttctgataaaccggacaatttagcaatgtgttctcagattcccttgtgtccgttggtggctggatggtgctatggtggcccatttttgagaggctctcccttgccagtttgccagtctctgccctccccgctattccctgcctgtttggcccctgtgggtggttgattttgcattcccctgggttgcaatagtgatcaaggaaaatagtgtgttctgggaaggactctgaccacagccagggttaggtgagaaggagagggagccaagaaggatttctcggaggagagaatgtttggactgtattttttacaaaacaaagaaaaaggaggctgggcgcggtggctcatgcctgtcatctcagcactttgggaggtcaaggtaggtggatcacgaggtcaggagttcaagaacagcctggccaaaatggtgaaaccccgtctactaaaaatacaaaaacaattagccggatgtggtggtgggtgcctgtaatcccagctacttgggaggctgaggcagagaattgcttaaaatcagaggatgcagtaggtggagatcacgccattgcactccagcctgggcaacagagcaaaactccatctcaaaaaaaaaaaagaaagaaagaaaaaagaaaaagaaaaaggacaagtgctccaggcagaggtcgctgtgtaggagatgacccagaagcactggatcatggcacattcattatttcttagggcaaactctgccaaactgcccttcctttatgcaaagcaaagtccactgttaacgggtagaatcagattcttttctggaagattctacatgtacaaagtacaaaggcactgggtcagtcctggttgctcaatgtcctcttatgctgagggagagtgagaatcaaaaggtaggtttatataaaactttgtctagtttggaaaactctgagcttccaagtcattatttttggtgggtttgtgtgatcaccatcttttctaccaacagaccatttactggaccacaggtattctggcatcatttttttcttttaaaactggtgagtgtgccattcttttctttttggaacccatatctgtggccatatttcaagacttttttttaatcattaggaataatttttacagttcagcttttcaaagcctgacaatgtgtcaagccattggggagagctcaagcacattttgtggtgccaaaatatggcttgcctcagagggtttgagtttatgacgacaccctggtgttaaactatcttgctctgagatgctaaaagagatgggggtagggagtcttttgaggtccccaaactgttcctggaggtggtcacccctttttttctttctctatgtgcctgtgctgggagatctgggtcacatggcagctaatgctgtggatcccaggcaactttttgctcaataactgtttcccaaatggctactcaggggcctttcagaattcacgagagctgtcagttgttatagtaaccggccccctgctgtcgaattggccctgagatgccagtggaagctcttggaacaagctaacacatagtcattagacaaaagcggaaagagattcactgctaaaggttgccagttaaacatgctccatgatacttaaaaagctggactgattctgttagggaagcggtgggtgggtaaatttttaaaccaagcttacttttcaggaaagggaagctccttgtatgttcagtctattctaggtaacaaccatctttctttggatttctcagaattaactgtcttctccccccggggttaattatgtctgttctgctggtttgctcaggtagcctcaaatatctcaattattcaagatattagttattgattgtgtggcatttgcttctcagcaaaagtgttgtcagtttacgggtggtagttttaagcgcctgtgattgtgtgtgaggaaaaactgcggagatagccggctctgctccaaaattcctgaaagagtgaatctggcagaattcagagtagggctaagggttgagaaaaagtctaaatattttaggaagctgcaaatttcaagtttttatgagaatttgtaaaaacattccaacacactcatgatttcttcagattaatgttcatagccacactgagtatatccatgatgtttgtaggacagttgttgtagttccaggatgtactcaatagagggagacaagaagttctgtgttacagcaatccctccccccttttaatcgtatttccaagtttgacttctccaagttttggttcctgtgccaagcacttttacccaatatggagtctaataattaatacaatcattgaaagcttgtattaagggtgaagaaaacctaacactccagaattagaggatgttcattcctagaagtgaaaaaccaccagcggactcaatagttaacaaaatgttaactcctttggaattacatacctggcttcagaattctttgtgggactcaacagaacttccaaaaaaagagaacttccatatatctgagtttgtcattgctattttatcaacagagtttggaaagaataggaatcatttcagtgtgaaatcctatagcccagctggtttgggagactaaatataattaaataaatactttcaagtgttcttgtgtgacagaagtgcatctttcaaattctgtagccaagtctcagatgctacagttatttaagttttaaggagaaactaaatataggacttaatatatagtaataacttgccaactgctgttcccatctccctgaggtgcctctcctatttattctccaatctgtattgtgaattaagaaaatgtttgttctgagatgagaggaaagcatggggtaaaagacaaaacccgaaatgtgtctaatggcaccaaattcagagacatttgtggcagaagggaggaccaaatgatctccaagttcactttactccaatgatattttaagccattctgtttgccagggcagtgtgtcaaaggtggaagagtgggtatatgaatgacaagggtcatcactgtgtttgtgatatcctaaccttccattaacaccggggtaatagaggctgcgaatatgtaaagatgacttaaaagagtaaagttcccactgggtatttcttacctcagcataaaagctcctcataagctcctttgtgcataagcatcctcttttgaaaatgtcacagatgaggcctgatgacggggtctgtctgtgttagatgggaggggagggcatttgtatgcaactcttggtggccaattgaaaatactgtattctacacctgttctcttttgttttttgtccatttagagggtgtaacaaaataaagtccaagggctttcccagacgtttccgtgaagtgccttcttctggggagagaggagagaaggggagcaggtgaggggcggtcaagcttaagtggggggcgtcttgatggccgggactggcttgccaaatttttgttttgttgccatggggattgaagtcttgtagatggcacagtgctgaaactcacctgctttacctgaattcccaaaagtaagacttgcaaatatcaattcagcttgtgggtagctggtaccaattaaaagtatgtcctgtgtgtgcttgctttgctttattttgcagttttgggggtgttatttgtttccgggtttgtatgtactgggggtgctctatgtttgtgtgtctgtatgtgtgttgcatccattttctttccaaatttttagatatttgcatggttttgagcttttaaaaaaacatataatgcatgcatatagccttatgtgaaaaatacctcttagaaacctaaatttgtagataagttagggatgaagagtaggaaggggagagagaagtgagcaaacatggatgtactatgtgtttttccttaagaatggtgaagttgttttttttttttaaaaaaaggaaatgcatatgagttctggatagtttgaatacttggaaaaattattgtcctggaaagagttatagtaaatgtttggaactcatgattgtacagttttaatcaccacacttgagtctcttgataatatttctgtaaggcctgtcttaggcaaactgtatttaatattaatatcttttaatattaagttgctaattagactaattcactaatccatattatgtcaggagcagtccctttttactttcaatgaaccaatttataggatttatgttagaatttttacatggaatgattcatctccattggttgtgggtaaatcagaatactgagatgaaattttagatatccaactattataatcagataaacctatgaaatctgagaaggtatagtttaggagttgtgacagattaatgagaaagtatatgatctattttcttttacactgtactgtgcaattttggccttgtagggaaagcaataactgctaacactggtaactaaattattctgtgatccctttttgcttattaatgtctttaatttctaatacattttcaaaactaaggatagaaactgaaatagaaatttctctgtatagttttggagtcaaagactaatcttaagagaggaagacgttggacatcacttaaatgcttaactgtcatacccagtccattataaatatgttgtgtttttgactataacactttaaaaacccagcatcaccttatgaatatcacaaagataaatgcacatccaatttcaggtcctccccagaagtgatgatgtagcctgccagactatttcttttatgtacttcgacccccacgtcagtgggcccattatagatatattttagatcctaacagagatgccccagtctctctggtatcttctctgctgctcagtgaaggaagcacaatcagtttcatctaggtctaggagttgggaaccatcttgtgaaactacaggtatttatagaatccctctgattgtgaatcatatcatttacttttttaaatagtgtagcagcttaaaagacagactttggctcagggagatatgtgttctaactgcagctctgccacttcctggccctgcgactaggaagggcccatagggccttagtttccttatctagaaaatgagtctaatgatagcaacttttcatgaggttgttgtgaagattaaatgggggtagtatatgtaaaatgcttagtgtgtgaaatatattaacccattgagaagatgaggaaattcaggctctgagaagttgtcacttggctaagccaccctgcctaagtggttgccttgggactccactgcagcggcgtgaatcctgagcagtaccccctctcacagctacatgtgctatgctaagtactccatgaaaacgatatgggccagatacagatcctgtcctcaaggggcgccatgtctgtgcttcttacgctagccgccctgctgtaatgtacaattcctcattctggcccactgtcccctctccttccccatgctctctccccaggcacttttgctgcctcctttcctgacccatgtccatcctgctgctgttctataaaagggctttgaaagacagggtgccccctacctctgtcaggcttctgcaggaggctggaatgcaagcccttcaaccaggctctctctcacctttgcctttttcattccgctctcattttctttcctggcttgtatctccacctaaaatgtggccaggaatcaaaagaagagcccccagtgatagctaaattgcaaccctccaaacagctacaagagctgttacagaatccctacacattaacttcatgtggcattactcttctgcccctgtcatctccctgtcccacagcaggaaggaaggagactgtgccgctaagacgcgttgcacagagaattgctaaaagcaggacaacagctgtgagaggtgattatcctcccagaaaggagaggaaaaaaacattgaagatcagacccaagtatttaattttttaataaagctgatttaagttttgagtaagtaatacttgacatgattcaaaataaaaaagtttaaaattatatgcaccactaaattaccatcccatcactcacccaccctgctccctacctcctcacaaataggtagcccctattgctagtttgttgtctattcttccagggattgttacacatatataatatataagcaaataatgaatatccttttatctccttgtacacaatggaatacagcatatgcaatcatgtgccttgctgttctcacttaacacacgatttccctatgcctatataatttcctcatccttttacacagaagcatggtattcctttgtatagaagtgtcatgatttaattaacctatcctctgtggctgtcattttgattgttctccgtcttttgttattataaacaatcgtgtgatgaataagtttatgtgtcactttgcaagtggataagcatgtctgtaggaaaattttcagaggaaaatttattggctgtatcacaaggtacatgctattgtgcatgtatggtgccaagttgccctccataatgggataccaaggtgggcttctctctgcagtctatgagcatgctatttccctacagccaacccagcacactgcattgtcaaactttggcctttttactaacctcataggtgaaaaagaaacggtgtctcggtgtgattttaatgtattatctcttactataagtgggattgaaccatttgtttttctgtaaactgtttatatcttttgcttgttttttctttgagttattggtctttttctaatgaagagagataatcccttggtagcaatgtgagttgcaaatattttttcccaattcatagtttacttcttaactgtatttatggttcttctttgatgtttatataatcagatttatctatattttctgctttgttttctagattttgagttttcttttaaaagtctctccattctgaggttactcttttttaaaatcacttttatggtttcaaattttaatagtaaattcatttggaatttaacctggttgatcgtgtgatgtctgaatctacttcccccccccgagatggtctcaagtattttaaaaaaaatactgtaatctggggcttagtgaagaggcatataataccttcttagatccttaaaatatcactcacagcaaaatacagtcaatcagtatattaacaaaataaggagttgccaagaggcttttacccagacattttagattataaatactgaaaaatatgtgcagtaaatataatgtgaatttcatttcttacctcctccccaaaatgagttggactatcacatcactgttaaccttccaaaatcagtgggatattgtgtcagtgccttaaaactgtggcaaatgaggtggagagcccctcaagcctcagtccagatgttcagaatattccagtctagggtctgaagggtgagacagacaccttaaagcccctgacttcaagccttcttttctaagtaatagctggaagtcttgggaagtcctgtccagggctcactttctcaaagccagctaaaataaaagaactgtcacggtctcatcaaaatgtggtttctgaagagaccttttctctcctatctcctggaaagtattaccagtacttcagtcagacctaggtatctgcaaggatttcttggcaaacttaatgcctagctaagagaatatagttttgagaccacttttgtgcctataatttatcattttctcccaccttcctaaagatgttaattgcaggcaatttgaatcatccaataaaattctcactatgggaatcagatttttgtcacttctgactgtaccaaaagtcgactaggccatctctcctattcatgtgaaatccaaaatatttttgaaacattctctcctcgttttagtatctgtttcctctttcacaccccatccatcactgcatgattttgttctcttttctcttcccttttccctttctctctcctcatatctgttaagccctgcttatctaaggtatgacagccatatgccctgggacttccacagccctcatgtgaaacttgccatttgattatcccccaaagcacattgacatttgtcaaatctcacgcccccttttatgatttggaaaatatggccactagaaacatattttggtttgagtttttcttttgagaagatcccttccggaagagatactacaagtgtaaactgagttttataaactgaatcacttaacatgccataaaagaaacttaacagcaagtgagttgttgtatatgaaaaatctcaacttagaacttacattgggctcctttccaagtggaatcccggagttatttcagacactcctctttgaggaaaagcccaacaacgcctacagcctttttcttttattgttgtatttgtcacttcaatttcttgaaacattttgccctaataaatcaatccatgcctttttaatacagctctcaatcatcttccttgaaagcatgtgaacgttttcaactttctatttgtaagtggctcttattcatgcagggtttactacaacagatccatttacaaaagtagatattaatgcgatttcttttcttgacagcatgaaaataaatgggattattagcgggtatgctactgtaaatttaaatgagggcagtgtgtaaatcagttaagattgtataattaatattcagcagcagctcagctaactgccctctctagtctgcaattagaattttgagctacacactgctaataaactctttgccaccctgatgtgattatagaaccattgagtttaatttgaagacagtcacttggtttctaattcctatataccaacaatcagttagttcatgattctgggttttcatatgagtctggaggccacactgtggtcctccaccctgcccatgtccagtagtcatgatgttgttcagggcagtgttgtagtaagcagaggaccctggatgagaacaatgtgacatcccaagcttctcagagtgggtgtacgtgttgacccagatgtctgtaaacctcaggaacccctttttcctgtaagcaggtttggagacctgccttttaaggaggtttgtttgtttgtttgtttgtttgttaatacagcagtgttgtgtggaattccagacatttctaatgttcagtctttctgcactcaagttcagcactttgcttctgaaaaatattggtcactaaattatttccaggttcttgtcagaagggcagaaaaagatataagaaaattgttagctcatatcagaggttatctaaacaggttcccggaaaaacagaagccacagaagaaaaggcctttatgcagaaatttggtcattctgggtattcttccttaagaattcctgggtggaaatggggggtcagaagtctagaggtttttttgtttgtttgttttggttattttgctacattttgtttgggtagtaagtctctataactggaattttattaatacttataaaggactgtcagagcagctgggcgtgtgtgtgtttcattagtcaagaaggccaattaaacatactggaacctgtcatgtgctggcagtgtatatttttcagcagggagctcagggacttgacgttgacagctgatactggccgatgtgtttcacatcctgactaaaagatgtactctgcacgttgtgtgtgctctgttttcccaagagtagactttatttttaaagaggtctttatccttaaaatatctcccttatttgaaagcatggaaggttatttttagaaatttcagtccaagagaaaatattcctaatcacaagcttcatgtgtcccatgtgggcttttaagaagccatgcatacttgcacattgctaccatcagggcttcagacactgtacagatctggaccacaggtgtgggttgtgggcttgagacccagaaaactgctaaccagatgccatacagatttgatcagctactatcacacattaccctctggacttccaatcaaacctttcttagaaatcttttgaagatatatgagcccgtgtttggttttctaaaaagggatgaacgaatggagagtaacataggaagcttgcttccactctgctacttggaactttctatagaaatgtgcatatatctaatatgttagtcatctttggtcaagcaccagaagcacttcggtagcatttagggctatgctgtaagaaaagtgcattcttttgaacagagacgctcattcggtgaggcaaaatgcttactctgtgagagggatatgagaaatgggaccaacttagggaccaacagattcacatttcccgtttcactttcattctgtctcacatacccactgagttcgaactgaggagataacttgtgcaaactgagctctttcttgtacccatctgggagcattcagtgaatgtttcatgtaagtccctctatcttgggtatcttgttgatgggggtgggctttagaaagccatctaaaacagtggttttccagttggtttaagtggcaggaaacttggaattcaggatgtcggaacatcattattattaataatattgaaataaatattgacaacttcaatgccttcatagaaactgaaattaattttcctaccagacaagtatagcagtccacaagggtggactctcaggagccattttccctttctcacagtggttcataattggacacagtacataccagaatccctagagggagtcttcacaatacacagagctatatataccccaccctgcacctgctctgttagaatcatcatgaatggggcttaccctgcctgggtattctaaaagctccctaagccaaagagctatgcactgcttgttaataaccaccatttgactgatactttactgataagagagagagagagactgagagacagactgactgactgttcagggccctccaaaattaaggcatacctaaatcagagtacttaaagtgtcagaaagatatatgctgcaaattgtacaatagggggaagtagaagataactaatttgggtcattactaggcctgtcagagtcagtgaaaataatgttacctggcctcagtttcttaaagggcacagacagcacccaggcgttggggaagggatgagaagtaaaagggcagaggtggaaacatgaaatatatggtggggaatcattggattatactttgtagttaaatttgtaaacatactttttcattacaaacatctatttcattgatttccctttttagggtacttacatatacaaatgttcactgaagagaaatgataattttggaaaatggctctttgtgatcctagaaatctgattcattcagggagggtctgtaagggtaagttagttgaaagagaattagacctagatagaaaattgaaattgcacgctcagtgacacacgtaagcacttcgagaaattcttttttttctttctttctttcttttttctttctttttttttttttttttttgagaccaagtcttgctctgttgcccaggctagagtgcagtggtgtgatctcggctcactgcaacctctgcctcccaggttcccaggttccaacgtttcttctgcctcagcctcccgagtagctggaactacaggcacgtgccaccacacctgcctaatttttgtatttttagtatagacggggtttcaccatcttggccaggctggtctcaaacttgtgatccacccacctcggcctcccaaagtgctgggattacaggcgtgagtcactgtgtctgggcagcgctttgagaaattctatctccattcccctgcgctcaaaattagagacaatactgcctccttaagtagatcacagttcagaggtttagaggcattaaaacttgtgtttttcttttccttttctccaaaatccctgcttttgctttttttattcctggatacctctgaaggtcaagaagcataatttctcgtggaaattccctgaaatgagcaagttaaaatacaatgtcatgtgatatgcagctgcttttcttaggtattaaacacagtgtagaatttgtacatgcaaagggaccatcttcatattgttaaggatcatgaaaagctgacaatagactgaccaccttcatcagtccctggcccagagtagaccccccaatagatagttattaaaggaataaattaaataccagcattgtaatgcctccatgaaatggaagattaagcaaacattaataaagaggatgccagtctatatttgttatcaaggagagatgcatatagaatgatctcatttcgttttttaaaaataaaacccccatgtagtcccagctacttaggaggctgaggcacgagaggcgtgagaatcgcccgaacctgggaggcggaggttgcagtgagctgagatcgtgccactgcactccagcctggatgacagagcgagactccatctcaaaataaaataaaatacatactcccccaatacccagaaaaaaaaatggaaaacagcccatctgtctatatttgggtgagactataataatagcccacagattgatctccttgttccatttctgctgccctctaatccattcatcatgtagcagccaaaatgagctttctgaaagaagcaaatcagatggtgcctctccatggattaaagcctttcattgactgtcccctgctcctagacaccagtgaaggttctttggtcgctagatcctgcatgatctggctctggcccacctctccaaccttgctttccacagcctttcccttgcctctggcttccttccagtttcctaaaatgcaccaagctccctctgctctaaggctcttcaactagctgcttgacctgcctaaaatggtcttcctccagagttttacagggttagacctccttaatcaggcctcagctcaaatgccacctcctcagtgaagtcccttccttcagccgacttcatttaccaccacatcattcttattttcttcattgctcttgactatttgaagcaatttatttgcttgttgtggatttttccccatgaagacataaatactaggagagtaggtgccttgtgtgtcttgtttatcattgtgctcccagctcctcactgcagatagatcaaggaatagtgaataaatgaggaaaagtatacagggatagacctcaaaatattaatagtgatcatcactaggaggaagattttgggtgtttttaattgatttttttctttttgttcatttgtcttgcctaatttttctgcaaagatgatctgttgcttatataatactttatcaattactccagtgcttagccaggcttaaggaagtagttttaaggattgcagacagcggcgggaatgtgttgtctgcatacttgatgctgtgcagtgggtgctgaataaacatttgccaaatccattgaaatctttattctacgggaagacattccccacaaagttctgtagttagttgcccacccatatatttgtgtgggaggcaagtgcatgatgtgcagcaaggtacagatgcggagctttgtcccccaggtttctgatccttatccccagtcgtgtgcttttcgctggcaatcatggagttattttgctccagggaaaatccattataaacagcagcacatggggcactagagtgtgatttgcttcagtacacactgcttttttcaaagataatgtggggcctgtagttccacatataactgagactggctgaactgtctgcctgtcttgtagggaaaaaaaaatctacaatatagtatatatatatatcctttccaagtcactttaacagtaacttggccaataacaattgtatttactaatagctttacattttagaagtctaatagccataataattatggtcttaaaatcaaagttatttcttgcatgcatttgtttttttcaagttaaaggctaacccagtaaattgcatcccattcatcttagtgacttagagcacttatttgggctattaagtagttgaatagctgtcctctaactcaacaaaagcaggttttccttagctatgatactggatggttaaggctttcattcatttgtgaagtccataacctgtgttttaactttaatgttacattctggaaatctgtgcaaattggagaaggtgggggaggagaggaaggaatccaagagtagaaaacttaataactaatttagagagagaaggaagttatctcaaacatcaaaataatttgtttcacatagatttccattgctttacattcagaagatttggttagcaccagagccctataatattatgtgcatttcatatccatgtagcttaagtctgactaacttatgttcttcacaaatttaggtaaaggcagctacgcaaagagtgatgaaaacttgttttattatttatattataaatgctgagcaattcataggaaacaaaaaaaacacgctcatttttcttcagtgctctattagagtagtcctgggaggcatgtgtcaagagttgtagtaactgacgttcaaaatctcctaatggtatggagcagcagtctagattgattctagagcactatccaaatggaaactgcttagagctactttccatctgaaaataggcactgcttaaagaacagcgcttcatactatgacatgtgatcatttctgattgcgtgtggttataatagcctgtataaaacctgagatggaaacatctttgtaactctgtggtctcttcactcccaaggagatcttgttttttatagtttcttgatttttctctaaccttcccaaccctagccccttctttggcctcatagaaacagggtatgcccaatggaatcatcccaggatatttttgattagattgagcaaagacaactgtgaagaaaagttgacttatctggtagttggaatacgggccccagaaaaagcaaagctgtaatgtgtgtaaatgttgtttggtgtgcgacgccagaggaggacagatcccagtgacactgtgcaccagaaggatgccgcctgcttggctaaaagacccagcagtagggccagctattgtaaagcccctccgccaaatgaacagggacccttctctggtcacaatagccattcacgctgagcagcttcattaaatattcagcctgtgcttccggcagctcattagggccgcaatgagcagtgacgtggatgcaggaaagctgagggccagccagcatcggaggcagaggctgagtgagctgctgatggcttttctcttcattgcctgtcctatgatgaccagtgtgtgctctctgctttgcttgaaatacaggtaaaaaaaacaaacaagcagatgacacgtaagggcttcaagaccttgtctcagatgttgtctggcaagggcctctgattctgagtgcttgccttcctgaagccctctgacccctttaaagagctgtctgaggcttagggggcctttgcatgaacaatgtggtgctattgtgtacttgggctgtttgatgacgatgttggaaggggatataaggtgtggttttgaacttggtgctggggatttagaatagcaaattattcctctgtaacgtaccaaatttagaaatattgtgagataaccctagcactctgtgtggtaggtttactctctaccatgttttcacgtatttgagtagttaaatactaagcctttccctttgaactatcagtttggatgcggtgatgataaaaaaaatggatatgctgtagcaattttgggcccctccaacaggctgaatgttgtccttgtatcttgttacttttacatgagtttaccctcagtgctgtgtgatgtttaaagctgggaagatctataaaataagaattaaaagaagatgaactcaaataaagtatattctattattgacatgtttttctcttttctacacagaaaatgttttcagactgctcatttctatgtggaagacagcagttcacctcgagtggtccctaatgaaagtatccctattattcctattccgggtaagtaagacactgctcttatttccaatgggctaattgtttttctcttttattctcagttttatgtgataaaacaacaaaatattttatagccttttaaagcttgcccagtataagaaattctctttagaagaacaaataactgagttaatgtagtatacagtcataggcaggaaagggaagtacagtagaaaaaagggaaaaaccgtacaaaaacattcttagtatctacttggactaaatttcatttgcataggcaatttgtgcttatatttttaaatcacaatttgtgacacatttttttaaaggtgatatttttctaagattctttcctctaaaataatgtatcttaatgttcaaagttttggttcttacgatggttgtgtggaaatagaggaatacattactggtctggtggatatttcacttttcttctagtaagaagataaagcacttggttagtgttggggtagggaataatggagtgcacactgtagtgaatcctagcaaatgccatagacatttagaagttcagcagtgggttaggtgtaataggatgtgggatttgaagatctcacccaccatttttatttggcatcccttcttctttgccagattttaactttctacgtcctggtttcattatgtgcttccaaatacgtatcttcagatattttagatacatctatcctcttgacattactcttttgcaaacagaagcatcactttgattataatgccacccctcctccacacctgaagctcccccatcctgctgatctgccctattctccataatgctttccaccagctaatgtgctatttattttacttttttctttgctctcttcccactacaatgagagctttataagggcaagtggctatatcctcagtgctaaaataattcttggcacatagtaggtattctttaagtacttacatgaatgaacgttagaaaaatttccttaaagttctaaaaaggtcttggctgtgaaactcagaggtagagtcattctttgggtaccatggagaaatgcttctattgtttgcagattgtcactacgtgtggttatggttgtggactgaattgccctgttatgtgtctgtatattgctaagtcattagatattactgggattgtccatgttttgtacattctagtcagcttttctcactaaaacttgccacacagaaacaagaagattaacagaaagtctctgattaacttcctgttggagcattttgtggctgctaaactaattctcataaagataggataagttttgtgttactgtgtgttctccactaaccctgcccctttttccttgctgaaggagactacttttcctttgagagtagagaaggtagacaggaatcatcagtcttcatcagcatgaaataagtagtttcattgaatctactggatttgcacaatagcgtgcatatactttttcctcttgctttacctacaatatgtgttgaccactggaaaattcctggcagcctttctcccctctgacctgatttgtctgacacagactcagttgtttggtagctgtgtaactgaaatccatttttgaagagttaaatggtgaaatacttactgggctgtttttccatttctattttcttttaccactggattaggaatcagaaaacctaggtccaccctgaaatctttgttcagtgccttcacctctctgaaccttagtttccagaatctgtaaattaattaggatgcctattctccttgccttttgaggtaactgtcaagacaacagtagatgatatttgtaaaagcactttggaaaccatacattaagcgaaacgtgtaagctgttgcaactttccttcccaaatcatggtactggtaatcccagcagtcatggagagagagcatttgcatgactctcatgttaaaattgtgtccctgacaccgaactacatccactaggtgtgccctaccttgaatcactcttctttgatataggctttagaactttcaattcactaggatcctctgaatatgccttgcaacacctttgagtaggtatattagaccagaaattgcttttgaatgttttctgtttcattcccagttacctatttaattaagaagttaaatactcaaaacccaggggcatttctttaaatgtgtctttttcccttttaaatatgtttctcctaattcatactcactactagtaatataactatatcaaaagaagactgcttcacattctccactgaatgagaagcccatgtattcaattgtacctcagttggcaaggtgaggcattcttgacaagctgtaacacgtttgtaaagatgaattattttaaatgtaaggcagtgtgatgttaaagggcttacctagtgaaatgacgagtgaggctcatctgttctctcaggtcttcatagctaacatagccttattaggagtatgcctaaacaaatgaacttacttcacccttaactgagagttaccctaaatgacctttccttaaagagctttcagcttgatcacaatctctcagcttggtaaataaaaccccacagtcctatttaatagttacatttggaaaatattttaattcacaaagcactttttaaacaattcactgttctattctttaggatttcttcttctttagttatagcagtacaacggtgtctcataaaagaaaaacacaattcaatttttaacaaacttgtgagttattttcactctactaaagcttttaccacaacttttctttaatggagacctccatggaatcattttaaatgatttatcttagaaattatccaattgtttttatttctaaaaataatacgagatttatagagctcctatgaagtatttattctacccattcaatctcagttatattttatccctgctcaaaacctaaataacaataataccagaccccagatttgtcaaattattttaccacttgggctcttcactctctataattgatttttttaaagatatttgcagacaacagacataactagtaaactgaatcattatactggctaaaaatatgtgcagcagggtgaagttgaaaattctggtaccaagctgttgtaaaaatagagctccagggtcatcactgtggaatatgcaatacactgtgttcccagagcttattttacagttagcctcttaaaaaattgttatctaataattattgagctttaccaacaaagtatgtttattttcactatagtcctatagagacaggtacagttgacacccccattttctggatgaagaaactgaggttcagagacttttttttaatttgcccaaggttacagagctaagcagtggagctaacactggaattatctctgtgacttcaaagcacagatgcttataaatggctctgccacctcttggcatacgactgtaacagttttcatatctcaagacttcagactcctcatttggatattgattcattaaatcaaggcattttcaaatacatgtgaatattctctttagttttttctgagttattgatcattaacttctctcactagcactgaccatttggtttttcattaaattctctttcatcctcctggagggaatttcataattcttgggttgacattttccccatattaaaaaaatctcccctctcatctctgttctctacttatttttattcttttccttcctgagagaaagactcaactcagcaagacatccattccctgcacaaaaacaggtctgtgtgatttaaatgacttaggaaacaagtcacagccacgttgaatgttgaacaaatttagacactaactcagcaactttggatgattctgctgtggctaaaattcataaataaatagcttgtatctttaaatcccaaagcatacgtggaatcagtaagttatactgacttttggaaactattataaaataggtaaatgattaaggaaagctttgctaaccctttgatactcctccctttgagatagcagttttataggagtttttgaagaattttgaatgaccagttttactaattctaacaggaatttaggatattcagtgtgttcttctgatttagtatagcaaagacagtgttttaagaacgaagacttttttttttcccctggtctcacctaacacttatgcaaaatatggaaatgctagacagagactgtgaatatatatggtggttgaggttaattagccatgttagaaaaaactcaaaatgcaagagtatttatccagcttgaaagaagtgcttttgaggttggcttccaatcactataaaggtagtatcaattattttatcagatagattttgaatggttagtgcctgttccatgcatgacatatgggaaaagtaggagcaggagagatacgttaaactgtgacttctgcaggagagtgaaaggggttttgactcaatatatttcactaagggtttttcaaaagaaaatgttccctggttactggtttcccattgtttcggtgtgaggataaagcataattgaatgcagtaacacagctgtcagtcccctcatatgctttccatcttctaaaatactgaagtggtcacaaaattctgtctttaagatccataatattcttaacactgacaggtacttataaaaatctagtgactcaggaatattcttttgaaaaaacaaacttgaatattacaattattaatgaagcattcactacattatattattcttttaggctttcattatatataaacttttagaaatcagaacttagctcatgaaattaacctgttatagagcatattgaaagagctttcctaaatatgcatactgtcagacacaaatgtcctaacgaatgcttttctctggaaattagaaaatctaactttctaataagagcattacaaaacaaaatgttgctgctaaccagtagcttagaaattcagaaatgattcatgcctttccagcagttaaaatacatcttaataatttgaaggtcactggcttcagcagggtgccagaatataaaggggttttaaacatgcagtttaaaacccttgggattaaaccaaccttgttggcatattttatttatacagagattatctccaaaagagattcattggtcttttgactataatgaagccctttctttattgacttcattgtgtcataaatgaaaagagatttctttttatggcaggaaataaaatgttccaacctccacaacactccatgcatcctaagagtgggatttagacaaaaatctatttgttgtgtcctaactcaggaaatcttgataatgtccttttgtttcatatttgctttatcttcctaagttgacacaaaggtattaccaaacaccttgagaggcctgaatttggcctctgagagactgagagggcagacaggaggggcagggggctgaattcctgaaaatgaggtctatccactagaggtgtggttaacagtacctgctaacaggccagttgttggagcagggtggagggaagggggtgggtaaggtctgagctgcactgatttgacccaagtactatgctagggctctgtttttctctgcccatggagatttggtcggaatttgggatagggttgagagatctgccaagggttaaatgaactttacagggattgctcatagagtgggtgacttaaggacctctggaatcttaatggtatttatataaatactcacacacttccagagtaagcaagaagggatattttattaaatagaccttaagtcaatcaactgcagcagctaagcatcttgtcaggaaggtaaatgccattaacaatttatctacctggcatcatcaaggtgaccagtctaccagtgtgaattttccaagtaactgaagcctaccctcaaagccaaagaatatcatttcaatcctttttgctgaaaagtttcttttaaatgtaagctctagggaggtaatataataaggaagaacccaggctttggagtctgcctggccctattacttgataatgacagtagccttggcaagcttcttggtccctgttaggcagtttcctcatctagaaaattagattaatcacagcacctagaacatagggttgtgcatgtaaagcaagtagcacctaacaataaatcatagatatgaaatgtttactaaatgccaggcactcttataagtacttgtgttatcttgtttacttttcataacactctatgaattatgaaatgtttactaaatgccaggcactcttataagtacttgtgttatcctgattgcttttcataacactctatgaattaagtactgttagttattcccattttacagatgaggaaagggaatcagagaagtggagtcacgcagtctggctctggcttttccacttataccgctgcctctggcttcctgatacacagcaagcatctcatcactggtggctgataagaatcacagatactcagttttactgagttacatgctaatggccttaccaggagctgtgtactaaggctgggccctctgtgcagctcctccctgtggtgtatgttcagggacagctttggctgcttatttttcctttctaatatcaaataaaaaactatgggcaagaaagctgtttctctttttatttatctgttattccttaagattaagagaaaggaaatttagcgtgtatgagtaggttagaggcatcaagtgttggtgatttccctctaacagttctgaagatgcaagtacggccgatacataactgtagattttggaaacagctttatgttcgaatgccattgttctttattgcctacagtgttgcatttgaggtcagcgttatctcagctttggtgttttcttctcagtagaagttgctgtcatcagttcaccctcttctgaggctctgcttttggtacctacaaacctaatttcaagcttcatcaaaagtacataagaaggttttgttgtggattgaacaaaataaaaggcccgttatgtacataatctaattctaaccacaaaaagctaaaatctgggaacttacttaagggtaaataataatatttaataacaataagcccacctcttcaggtactgattctctacattagtcattttataatcgggtgatttagtgataatggtagtggtcccacttttgcctagtttaaacctttggtatctgaaaattttgtaagtacaaatagtggctgagtaaagtggctcatgcctataataatctcagtgctttgggaggcagaggcaggaggatcactcgagcccaagagtttgagactagcctggacaacatagtgagaccccatctctacaaaaaatataagccaggtgtggtgacgtgggcctgtagtcccagctacgcaggaggctgaggtggaaggattgcttgaggctaggagttcaagaccagcctgggcaacatagcaagactccatctctacaaaaaatgtaagccaggtgtggtggcatgggcctgtagtttcagctactcaggaggctgaggtggaaggattgcttgaggctaggagttcaagaccagcctgggcaacatagcaagactccatctctttaaattagccaggcatggtggcacggaactatacctagctacttaggagactggggtgggaggatcacttgagctcaggagtttgaggtggcagtgagatacaattgagcagctgcactccaaccagcctgggtgacacagtgagaccatgtctcaaaaaaaaaaattagcacaaaattatcaagtgatatttatcagattaaccaggatattaagaattaaaaagtttaatttgttattccttgaaattatagtactttgagaatgaagacaaacagtgtatcctagtacacaggaatacagtctttgggttcaatggacctgggttcaaatctcagctctgccacttaactgagtctttttggacaagttgcctcggtttccttatgtgcactttgagaataaccatgttcccttcatctggttcttacagagataaatgtgtgaaaaacatttagcacagtccctggtaaccagtaagggcttaataaatggtggttttcctctcattctaccagctttatcattatcctgcttttgttataccataataatctctcatttaatctgttgtcagtgaaaacatcttcactttgattccagccccttttttcctttatgcttctcccaccaccaccactgcatcagtgacatttactcccactgtcatcaaatccatccttttaatggcacttgtagtctttatcacataattacactgttcttgctctcccttgtgttcatctcttcaccaacacaaatgtccttgagcagagaccatctccctaatatctggctgaatactaggtgctcagaaacggcttcatccaggggtttcccattctctctgagtcggagcactttttatctagggtctgcagccaacttcttctgccattctaaacttttttcagctgcaagatgcatatgaaaacagtatgcatttcttggagtacatgttaatacatataaagtacacagaaagtgcctggcctagttaatgctgctaatattcccttcaatctttaatgaaactcagacatttaggtggagatagcatgttttggatgaatgtcttcttaaaacacacagggcctttccagataaaaattgagctgattaggcctctgatgctgtcctaattgcttggccttctgctagttacattgattttataatcatctggctcatgttgagagaatgtaatagaaaaattatgagaatgattagaataattagtcatagccttatattcatctcagtataaagaaaagagatttatgactcctcagctatttatcttgattgcagggcaaatgctgtattatctgggtagctgacagtggtcagtacagcatgcatctgtatgtatgtccgcctgtctggtacttttgtgacattattggtggtgcctggaaacccagagggtgtggttaggcgtccttggataaagatgcaaattggagagactagtgagtcatatatttccatgattatcacactgaactctgctggatttttgctgcttctagccatagtggcagcaggcatactgatttctgggcatgtgtgtgtgacattagcttggatattacagttgagcactttgcagaaaaaaacaataagcagttaacctgaaagcatttcttttaatgatctgaggtgggctatggcctttaaaatgctgtggtttttaccttacagagtaaaacagttctaaagctgacatgttttttcttattttgaactagagtccatgttcctaatcacggcactgtaagttctcgggaatctaaaattctaaactatcattgtcgtataaatgttgccttcaacttattactctgctaaatatgtcactctgcccttgaaaatagtgttgtatctgtcatttctaagtatatgaaagtcctatagtctacatactagagtgattctgtggttaggttgtgtcccatctcacccattttgcctcttgtttgaaaatgagtttattcttgggctaatcatttagagactctccagctttgtacatagtaacccttttctcaacttgagatcattttcattgccactgatcattattgtagaatttgcttctaaacattttaagtgaagtgatcagataattttggaaattttcttgaactgtgcattctgctaaatattctggagaaacattttggctccgcttactctgttaatgctggttacatcatgagagctatagatttcttgggcatgcaaaatgattgcatattcatgaacatcttcaattctgaaatatttgtaaataacttggcaatttttttcataaggttgcctattaacatgattaggactttaattgttcacacaggaagaatttgtacttacagagcaccacctatttgataagtaacatttctatgctaagcaacttggattatgaacacataagtcaccttcctaaaacaaagtataagagatgctattttccacttaagcatgattcaagtttgaaaatgtcaatagatgcaaaaagccaccctagagctttgctctctcgaaagaaagaaggaatgacatagtcaatgttaactgtcaccagatgaagagaaatcagattgtcaggcctggatctataaaattcttgccaaagtaggacctcatttacacatacagatcttcataccctttgctaagaaaagcatctgtggcagtttagatgtttgtgcgtttgccaaagatctttcactctgaataaagtaaatgtcatgtctgttgtttatctcaaattcagcagagtatttttaaaaggaaatatttgtgggggagggtcgagggagaagggaagaaggaggttggggagctccagttagttgggtgtggctattttatagcagtactcaagtatcatgataaataagcttaaaacatactttgggcttatgaactgaaagtctccttttgaagtgacaacacgaaataaatgggaatgtggagtcttcccgaatctatacctagtctgtcaacaccaaaaaaatccagttaattcagtcaaactgattatttggcatcatgtagacacagctgtcttgagctaaaattttgaacacttaaagatagatggcattgtacccagagccagctggtacaatggcatctatctataattgtgtataaaggattgcttaaaacttataagattggaaatagaacttaattgcttaaagttcaagctggactccattgaacagcaattaaaaaaaaacaacaacaacaacaacaaagaaaacccctggtgtgataaaatttcttggcaaatgggtacccttgataaattcacacttttagttaagagtatgctatggtaatttaactatgtaaattgcgttgaatataaaaataaggggaattctctatgtacctttttttaaaaaccatatttaacctggcttgtaggcattaaagtcataatgagatcctaatgtaaaataaattctgagacttttcttcaggacatctattttgtgtgatacaattattttgctctttgcaaaaatcaagtatttgtcttaaggatgctttgctttatcagtgtaatttgttttatggaagtattctatgtaactttgaatattattttattccccccagatgacatggaagccattcctgtcaaacagtttgtcaaacacatcggtgagctctattctaataaccagcatgggttctctgaggattttgaggtatgtttcaaggctggaagttaacttccagaaacctaagtcttactttatgcagatttttgtaaacttgaactgaattcattccaagcataacaaaacagtaactacggaaagtggagtttttcttttcatctattattttaataggcattcttttccaaataaaatttaggtgaaaggggagttgattgtacctgtcctgaatatgtatttctacaaaagaaccgacttagtgatagaaaagaagcaaactggtagggattgcttttcaggttcttgctacatctaattctaactgggaacagcagtcataacacaaggctccctaattccatgtcttttctgcaatgcacatggtatagtgaagatagcaggtttggtgtctgagaaactgggtgctggcttcatcagtagtgagcttcataatcctcagaccaatcacctcatctcggatccccagttttcccatttttgaaaaatggcaccaatgtcacctacattgtaacgtcgttggaaaaataaatgattaacatctttaaaagtgccaagttcattgttaagaaccatgcaaaggttgactgttgttgttttcatgattattaatccttggagagaagacttgggttaacacagccttctgattttaagaactggtgtgtaggaaacaaggtagagagaggcatgtaccaccctgccaactctgggttctgtgccagttcagcagtgacagggtgtcaatgaggagctattaaacagactgcccttttcttcactgaggcgcttaactaaggcacatctctggcagcaagagttgtgtcgaggaggccaagttttcatggcagctcagctgtcttctagctctgtgggtaagttggttcctttctctgtctcatttctactttaaaatggaaatgatgatgatgatgatgctaacctacccatctctttcaacaaaattggttacagggcaaaatgaagtaatggaaggtaagcactttaagatcatctaggagtcatacagctggaaggtgcagttaccttgaatgaacaatgagaaataaaaacaggatgaaaagcccctgtctatgcaaatttagaatcccaaaaggctatcataaaggcagttatattgctgacttgttttaaattaagtctttctcttagtttttttgttagtttttgttgttttgagcagaatgaaaacaaaggtggtagaaagaacctctgatttattctacgaagtcatatgttttatggaaccaacaaaagcatgtcaagtatttaatgctattagatgcttactaaaaaaggtgcctattcaactacaaagaacatggtttaagtcaaacattttgtattcatgaggacagcaaatgtgtgtggtgttaaagtgatttagttcaattgactgttggctggatgactgagcaagaatattgaggcatttaacaacgttgatggtattcaggacaaacatttatcctctagagagccgaatttgatcaggatgatcaaatgcaactccagtttctcaattatttatgatttgagaccccagtgctattcatcacagctggttttgacaccatttaattattcaaaataatcagctacacctctgtaaacttgatctgacttaaaatgggctttgctgcatcaaaatcatgcttcttaacaaatcctgggcatctgtaccctatttctgtcctaaaaaaatatactgcagctaaaagctttaatcgcctacattgaactttagagcttaaatagtattagctgatacttatgggagtggaatggggagggcaggcaggaaggtgaaagggctgttgtgatttcactgtcttttcaggtttgaaaggtttaaaatcagagctgttcacaataggaagaatatgctttcttctaaaaagaacagcaaagcagcaacgtaaaggggagaataagaaaatagaaaagctcaccaatactactgtcaccttataattaggtgaaaatttgaagtacttttaaaagagtagtattccttttgggtaactgctaaaagggaaaactggtaataggctacataagaagctattacggctattttataaacagagatagtaacaggctttataagaaaggacagaaaaagattttgtgtaattaaaaacaaaattgtattatggtaagagagttaaggtaatcttagtctcagatttccagacccatttacctggaataatgatggccagcatttactagttagcactgtgcatggatcattctatttcctgaggtaggtgtatcttattgtccccattttactgatgacgaaactacccatgagaaaactgaggctgtgggtggctacattttgaaatggcaggagtagggtttaagaccagggtatctgacttgaacccacatggttcaccttgacaccatccagactctcattaaagtagtgtcctgggccaggcacagtggctcacacctgtaatcccaacactttgggagaacaaggtgggaggatcgcttgagatcaggagttcccaaccagcctggacaacacagcaagactctgtctctacaaaaaaaattttttttaattagccaggtgtggtgacgcacaactgtggtcctagctattcagaggctgaggctgaggcaggaggatcacttgagcccaggatattgaggctgcagtgacctatgaccgtaccactgcactccagcctgagcgacagagcaagaccctgtctcaggaaaaaacaccaaaaagccagagtaatgtcctgtaatgagccaaggtcagaaggagaaataaggaagcttgcaagtgactagaaatgatcatgcctcggtgccttaacaatacaaaagtggggagagcagccaaattaggaaccccccccactaggagtattagctgcccattacatgatctttatggtctcgagccttctaagatagctgagaatacgacttataaaaatcttatccaacatgtaggcctaaaattagtcttaaaattatgagaaatacaactgaaaagttaacaactggacattaagaggagctaaaacaacccatctaacagttactgatgatctaccattctctggacataatataagatacaaatatgaattagagtccttgccctcaaagagttcaatctggtactgggggaggccagagtgtacacaaccaaaacagaaacaggacaaagcaaaataagtgctattgtacaggcataaagttctgaagaagtgcaaaggagaaaggcatctatgtattttcattggagatttcagcaaaaattctcatccatcatgtttaaacatctcggaagtaaaaaaatgttggtgaataactatcgtagtttcagaactttactgcttggagaatgagaaaaacaattcactggtacctttgactctttgtctagaagtgttgctgtaagccagctttttgttcttgtcaaataaattctagagaccgtgaaaagcaacatcatacagtatttgcagtcactagaaataacatcagtccttttcttgtgatagcgttggatgacaccattaccttggctacctgagctaacttcaacctcattgtccttcccagggagtagtttcccagagtagtattaaaagattgacagcctcttccttggcccccacaaacataatgcagaaggcttccaaaagaccagtgctagcatactctttcaaaaggaaggcactccaaagctccatgagtcagaagaattaacaggcagggactggtagaatcagaagtctaaaagagtgcaggatgaggccagaagtccacagcccctggacaagatcctttgggggactgcctctattacagttaaccagctgtgctaaatttgggctggttgttcatcttaaatcaaaagaacaaagcttagtccacctgagcccatgctctgagggaccagtggccacaatcactttaggaaatgaagggagatgtccagggctgctgatgatgtataatagggaagtctctggtcagaggtgtaatgctgcaccgactgctgcctgcaagagggcagaaaatgagcctgtaggcagggctgtccaatcttttggcttccctaggccacattggaagaagaaatgtcttgggccacacataaaatacactaatgagagctgatgagctaaaaaattgcagggaaaaaaaaaaccctcaatgttttaagaaagtttacgaatttgtgttgggctgctttcaaagccatcctgggccgcctgtggcctgtgggccatggattggataagcttgctgtagagttagtttcctcagcgtttttgacaaaaatgccagtttgggtcttaaatatcttaagaaaaacgtttttaaacggttatgaggtaaatcacagttttttgagattttggtgaagagggagataaaagggagatagccagatttcatgaaaaataattcttatgctagagaccagctgcaggataataatgctgtgttatactctccaaagataggttagttttctagggggcaaatgcagtcattttgataaagatacatggatttggatacaggaagagaacaggcattcttaccaaggtaaatggcaataaagcaataagcaggaaatcaaatggtcttttcaaagggtatggagttaatattgtctgggattgggaagggtggggaagataagatgggaccttgaaagcctggctaagggaatgtggaatctctccacacgtttctgaggaagggaataacaaagtcagcacaacgtttgaggaaaatcagtctggcagcaatttataccctgagcaggagagagtaggggctggaagatgcagtgtaaccagcacctgtcaaaggccagttctgtgtccgacactgtacatgcactgggtcactaccatgacctaaacccatcagtcatctgtagaacagtctctttaccacaattgtaggctgcctgaactcaggcactaagaatgttacccctacttggtgtaatacttggtaaccagatccaaataatttattctcagctacctttttggaactgagcaatctgaaagatttctagaagttttgttgcattatttttttgaattgagccacagtatagtaggacagtaggtctttaagtgctctttaaatagcctcttgcatcaatgactgtaggtaggaagtgatttagcctacatcacctccctaaaattctcgttacatcaatttttagggtttgttcagtcttcgattttttgctttattttacacctgttttatgttggccttctcctatgcttatgtgcctgttaagattcaaactgttctttttgagaattctagctttgttacatagggagtaaaatataaacaagcttaaactatttatcaagttctgaataggtaaatttacaatgcatactccattggccagtgtctctttaaagggtttttaacacactaaaatcctgttaactttgaaatggcagttctgatagagaaaagccactcccagatcagatgatattatcagcatctaaatgagccaggcagtactgcaaggaattacagatgacattattatctacatgacaaaatcagaaggcctcaggcaaaccccatgggttctaataaaatcagatttgacaatatttattacgattttttgtttctgtcattcatctaattggaaaagtgaaacagaggcaacagatcagacaaggggttttagataacaaagagtttggccatattgaatgacagctttaaacaatactgacagctgctcccaagcagtcttggtcaattgcattatattagaaaagaggctccaacttcagtccatagctagggtggtcagatctatacaacaggaaaaaaaaatcaataaacaaagtaaatctcagactaaggtactaaaagccaaaatctctcagcataagatacctgaacaactcaaccctaaagaagtacatgccaaaggtgtgaccttcaaaacccgaaaacaaaagactaacttgtttcaaatccattttcaaaagttgtctgcccttgaaactcttcaaaagagcatggctcagagcttataaggcagtttcaaaaggcaggtcccaacgtgctaagtttggctagcattgctcatgttcttacgtagactgatttgtgatcacactttattatctcattttagagaagagccaaagggcagccttaaagctccttaaaccagtgttttccaaaccataggttataaactatgttagaacagaatatattggagtttagtaagagtaaggaaagggtaagaactgtcattaaacacactttcccagaaaggtggattgaattaatgcctgtggggcttttttttttttttttaaatggacagctgggaaggactataattatggaaacttcaatttacagtgtccaacaattggagagtcattgaatactgtttctttgaacacacagaaattctttgcttttataccttaaattctttgagtacagtaacttcctccttctagagaagaagtgtacttctccctggggaagtactttgtgaatataaaagacaaccagttcattgttttcattatgtttaatgtaaatactatggaaaacatgcataattactaggcaactcctttgtggaaaaaaaaagtctgcatgcttctaaactctgctacatctgttctgtgtaaaacatttctcctgataattttgtgttactttgttcaggctctttgtagcagctgtgtactgctaatgacttcccttattagtcagctccagtactttcttgggtttgaagcatatagtgtagaaaaatttggcttttcagcaacgttgtattaggctaatggatgacgtttaaatccacggccaaggtaggataagagtgttatttctgctactgctatttttccaaagaaggataacttttaaaatactagagttcacaaataatttgtcaagactgtatatatgagatatgaccattagttgggctgttattagggttatttcagcactgagtctttagagtcaatgcaccctcacaattataaaatgaggctataaggcctgtaagcatattgcaaatcatggtagagattatacttcttagaaattccctttcttcctttaagacttaggtaaattttttcacctgtctaaagccttcctctgttctgtgctcccatcagagctttctcaggcctcttttgtattcatcatgtttgactatctttttgaatatttttctcacccatagactatgatgtattcaaaaagagatattgttttacatctcagggactaggtcaaaaactagaaaaaagtagatgattgatgaaatagtaaataatgaaatctttatacctttttcacattcttcataaactcgttataaatatatcaataattatatccgaagttgggattgagaaggtaacggtggctgtggccagggagtgagtaaatactttatgcctttaaatgtatatggtgttcctttgtttctaaactgtgtctataatcttgctgttttcttcactaggaagtccagcgctgtactgctgatatgaacatcactgcagagcattccaatcatccagaaaacaagcacaaaaacagatacatcaacattttagcatgtgagtaataagctttaaactaccttcaactgcgaggaaattaaattttcatgctgggtataagctgaaagccaagcagtcagaagcaggatgccaagaaagaatgattcttgcaagctaacctctcattagcccatcttcaacagtgtagaagttgggacattttcttcccccttagcctttcattaggctgtcagggctcagcgagcttaataaggtgactgaaagaaaatgtttggagcttcgctattttcacatgaagtgatgtcatatcacatgttgggagccaaaatttgaatgtcacttggttacactgacattgtttttaacctgtaagggccaaatcttttaatacaaatgaaaatattgggaattgaatcaagcaagctgaatttcaaagcattctttcaaagactacataattggcttgtaccttaaatgatgagcctccaggccttttggtccatgtgcttactcctatctatcacatttccatggtcaggaatattctgtaggttagggactcaaacaaatggacattcttcatacagagcctcaaggaataccctaggagcacaagctacttctatggctagaagaccacatttcacagacatgtggggcttggctcactggcatataatatatgctttgatactaagggtaggggcatagatatttatagttaacatataccatggtaaggacattacatagaattgtatacaatagtgcatttaaattggaccacttaaaatttgaacagtactgtataatgttttcttaaagttttagtgaaatataattcatataccatatgaaatttacccatttaaggccaggcacagtggcttacgcctgtaatcccagcactttcggaggccgaggcaggtggatcacttgaggccatgagtgcaagaccagcctggccaacatggtgaaactctgtctctacaaaaaatactaaacttggctgggcacagtgactcacgcctgtaatcccagcactttgggaggctgaggcgggcggatcacgaggtcaggagatcgagaccatcctggctaatgcggtgaaaccctgtctctactaaaaatacaaaaattagccgggcgtggtggcaggcgcctgtagtcccagctactcgggaggctaaggcaggagaatggcatgaacccaggaggcggagcttgcagtgagccgagatcacgccactgtactccatcctgggtgacagagtgagactccatctgaaaaaaaaaaaaaaaattctgaagttaatgggatgtggtggcatgcgcctgtagtcccagctaatggagaggcacacgaatcacttgaacccaggagggggaggttgttgtgaaccaagattgtgccactgcactcaagcctggggaacagagcaagaccttgtctccaaaaaaaaaaaaatttcctagggtatacaactctggggttttagtatattcacggagttgtacgatcatcaccacaatctaattttagaacagtttttgcacctcagcaagaaacctgttagcaggcactcccaattcctccttctctccagcacttagaaaccctgtatctaccttctgtctctgtggttttgcatattctggacatttcatataaacagattcatactatatgtgaccttttgtgtctggcttctttaatttagcgcaatgatttcaacactcatccatgttgtaccatatatcaatacttcattcctttttatggctgaataatactctaatgtgtggatatacagcattttgtctattcattcatcatttgatggacattgtttcttttccgcttctcagctagtatgaataccgctatgagcattcatgtacaagtctttatgtagacagatattttcacttctctttggtgtatacgtaggagtagaatttgctagattatatggtaattctatgtttaaaattttgaggaactatcaaactcttttccaaagtggctattcattttacgttcccaccaacaatatataaagggtccagtgtttccacatcctcaccaactcttactatttaaaaaaaaaaaaaaaacagccttcctaaccggtatgaagtggtatcctattgtagtttcgatttgcatgtccccaattattagtgatgttgagcatcttttcgtgcttattggccatttgtataacttgtttggagaaatgtctaatcagatcctttaccattttttaactggcttacttttgtcttttgttgagttgtaagagttctttatatattctggatacagatcatttattgaatatacagtttgcaaatattttctcattctgtgcattgtcttttcactttcttaatgtgagttctctaaatttgttcctttttcaagattgttttggctattctttcaacaattgtttctgaattgtactactgtactgcttttgttaaatttattcctaagtattttattccatttgatcctaatgtaaatgaaattgtttacttagttttatttttggattgctcattgctagtttatataaatacatttgtaggttgtatcctacaaccttgctgaatccgtcttttctagtagttttttcttgattccttgaatttctgtatacatgatgtcctctataaacaaaggtagttttatttctaaataaaatgttacaaaaactccaagttacttttgaataggattgtttgttctacttttctgagaaaatgaactggttaaaaaagccagggggagaacaaggaagaaagtcaaacctctccctagtctttggattgactttggcagtatttgttggccagctcaatcaaggctcaccactgctgtgactatgaggatttctctatccagatacacctcctttctaaccagagaaatcaggcaaggatatgtatacatctgtgccttatatatacatacatacatacacacacacacacacacacacacacacgtatacatctgtgccttatatacacacacacacacacacacacacacacaccattctctccaccagagcatcctttacttctctaatgtcaaacatcacttactgccttgctaaaagtattgtggcaaaaaaaggaggagaaaatcaaagcaactaatgtgtgatgtgcccaaaggtcatggtgttttgctagaaaaccatcatctctggttaaatgtgaattgcactttcacaacttcatttgtgattttactttcacaatttcaaattagatgtaattttatttttaaacattcagggagttaggttttggtgttctcttggccactcagattctgggcacattgcctgccttcatctaccctctatattaatgccttttcatagcaaagaatagcatagaaacaagtaaaatcagaccgtgaatgagccagaaacatgatgtatgaaaaaccttctctcagattcatcacaactttcaaggtatatgtggatgttaccaaatcacctcccaaattgatctattaatgtcttatttgtcagtctaagaaataacaatatgcaattaatgactactaaggcataacggtttggatccagatgccttaggagaaatttttcctttggggcctatttatatcaagcaacacctgtttcatgtcaactgtaaactgaaagtttgtcagaacaacaaaaacagttcacagttccaaaaacatagagggctctcaaaaattgcttggtatattctgaggtcagtaatgcctatgctgatccactcattggacttctttttcaactagccttttatgataatgactataaacagaaacataaattgggttttgcccattctgtttctacctagggaaaataaaattataacctcagcttccttttacttattttgctatcctaaaaaaaacaggcacaatctgctgggcaactagatacacatgtcatgcatcacctacccccaacttttgttcattaactgaggttaagtggatcctaaaatctgaacattaacttcagattcctgtaatgagattactcttaacaaaagctctggtttcctcaattccttaggttctgttagggtagcagggaatccaagtgaattagcaatggaattgcctgaaaatattaatagatgttttggacttgacagatcagtcacccttttatatttgtattaatggggagggaacaggggcatagggcataatcaaagccctttgaacttggctttaaaatacagaacaagcaaatacctttgaacttggctttaaaatacagaggactacaatttgtaatagttttacatgagtttgcatcctgagagcaggagatgtaggagtggctctgtattttgggatgggtttgaatgctctatttagttgttctgccaaaagttttctcagactaccttgggagatgtcatgttacctgattgccttgtgttgtgctttagaatggtgctagtttctgaattatccattttatttctgtttttttttcttatcttctatagatgatcacagtagggtgaagttaagacctttaccaggaaaagactctaagcacagcgactacattaatgcaaactatgttgatgtaagtcagaactgttattataaacctgtttctagaaattgaagactgcagcagaaactgtttaatatattttaatactgtacagagctttcactaaaaacaaagcccattcaatatggaaggcatttgaattattgactggtcttctgtgataactgctttcatctcactttgtgctgtgtcattttgaagggttacaacaaagcaaaagcctacattgccacccaaggacctttgaagtctacatttgaagatttctggaggatgatttgggaacaaaacactggaatcattgtgatgattacgaaccttgtggaaaaaggaagagtaagagccttttgactcactatcttaataatgcaccttcattcaaaagatacttgtggagtacctgctttagggtaggaacttgacaaggtataaagagttacggaaatgaaaagtgttctctctgctttatcttgcttatgattcagaaggaaagagagctaaggcattatgagagtaaatgtgatgacagagatgaacagggtatcagtggaatgctgcaaaatgaatcaatgtatcctctgtacattcctctgtacagagattttttaaaggagcaaatacttgagacttgaacaatgattacgaggaattacacaggctaaaaagagaaggaaagggtgttctaagtacaggggacagacaacagtaaacagggaaattgaaagaagcgtggtgtagacaaggaactactaatagttaagattgggggaagcaaaaattgcctaaacagtttaaccatcattaagaggaccttttaaaaaaatgattagtgctgtagaatttattggattatgagtttacattagatgatgctaatttaggctggaataaaagctacacttcaaggaatcaccacactgggttgataggtgcatcaaaccactatggcacatgattccctatgtaacaaacctgcaaatcttgcacatgtaccccaaaactaaaactaaaaattaaaaacaaacaaaaataaaaataaataaaagaacctacgcttcaggttccctgctcaaaatcaccactgcttcatgttgtggagtcactgttttacttttgatgatccaagttacaataagaagagtctcacagttagaagagaaccttccatgaatccaacccggccttccaaatgatacttaagctccctttataacaaaccttacccacatttcttacaggtcagacatagaggtttctttcttagtcccttttaaaaatgcattataatgcaaaaataaaaatgcattatatattgaaaggtgaccataaatactaggcccatttctcacatggtctcacacaaacttatcccaagccatcagccttgtcagaggtcacacctgcctttaagcagttaaactcacgtattcctttttcagtcaactaaatggcaatctcacctgtgttttaacattgtcgtttgaaattacattatcaacagaattgtggcatagattgcagttatactttacaacttttttctttctgcagcgaaaatgtgatcagtattggccaacagagaacagtgaggaatatggaaacattattgtcacgctgaagagcacaaaaatacatgcctgctacactgttcgtcgtttttcaatcagaaatacaaaagtgaaaaaggtatggaaggaattgggtaggctgccagggcatcccctttttatacttgtatgaaaattactgtacaaccaaggccaaatctcataaccaacttggtttttaaaaagtatttttaaaacattttttcataactcttttgattgacatcagtgtatggtgtgaaaggtattggcaaagcatctaatagaatttaactggcctgattgagcctttaatctctacatgaacaggcttcattttttaaaaaatcatcctcttaggttttggtaatactcagcaaatatggcagcatctgtttgatttagcttttttattccaattttctgacagatataaagcattgtttcccaaagtatgttccaaggaatacttgtcctgtaagattcttgtaaacatcagattctgctgttcaagaatgggaaatgaatgctacataatatatatccccccagcattttagaaatttacagtgaacataagtgaccagagcactggtgttaacaataatacccttctctatagaactactaataccctaggaatcacatttttgtggaaatactgttttcaggttatctcagtttctttttcaaaatccactgtcacaacaaatatcctagatcaatcatcacagcagtacacagtctccccttaattgtggaaggtatgtttcaagacccccggtggatgcttgaaacctcaggtagtactgaagcctatttataacaatgtcttttcctatacatacatatctatgataaaatttaatttatcaattaggcacagcaagagagtaacaatactgaaatagaacaataatattctataataaaagttatatgaatatatactgtttctcttaaaatactgtaatatttttggactgtggttgacctcgggaatgtgaaactgcagataaggaggaaatactgtattaagaactgtaaatagacgctcattaaaaaatgtagttattccacagaacttaggtatggcagttgtttgcagcaatgggataattttttttttttcttggtgtcttggacattttggaaaatgtgataaaactgtagcctccttgccccatttatattcacacttactcacatttttatgtaaaatttcagtggctccaaagcccatctgtgatcccaggttaactatcctttctatgtatgtttatttcccaaaatggcagaaataacatgaatatcagtagcatagcaatacatctgtgttctctactatgaaatagagctgctggctggctcaagatgatcaataaccagcaaaaaacttacaaagcccaactgatgagaatatttcaggtatttaaacagggcccacttactcttgttttagaaacagcttaagtcagaggaagaagtcaaataggaactttaggtgttttacatactaataggaaaaagtagaaaaatgagagttaacagaagaattaaattaaagccatcatgggcctttgtacaatagcacaggaccagacacacttcaagcttcagtgttaatgaccctgagtcatccaaaaaaaatttagaaattaggtattgataataagaaatcgtatcatagcaaataatctatttggggaatatttcatctaaagtagttaaaatgtaaaaagttcagacacttaaaggaaaactactctgaaaaagtcatttatgaaagtgacaggtaaatgagacattgcctctgactctaaagacagaagtatttgacatttaaaatcttcccatcacttcctggatagtttacagcagcaacaagcactctggctcctaaaggtccagcctggacagtggagaaggaatgggaatcacagcccacagagacatgaaagcaaagtactaagatctggacttggggcagaaagtcaggaaatggaggccttgcaggaaaagtacaagtgctttggatagttccaaatccaaaaaaaactgatactaaatgttcattcttagtacaatcttaaacagtcttctcttctaagtgatagtgacacttcatatccagcttggtaatgtctccaatttaatggcatgaaagttggctacaagggggaataacctagcctgggaacagtgattagggtgaatgtgatcagtggtcatgtgtcctgacacccttacattatttttttccagaatgtccacccccccgcttaaagacatcttttttcacttttctcacagggtcagaagggaaatcccaagggtcgtcagaatgaaagggtagtgatccagtatcactatacacagtggcctgacatgggagttcccgagtatgcccttccagtactgactttcgtgaggagatcctcagcagctcggatgccagaaacgggccctgtgttggtgcactgcaggtagggtctaggattcaacatgtgaaatagatggggcaggggacttaggcctcagtgaccttggaccacaatgattgctactgctttcacttagaagctgaatcttccactggaaactgggatggataagacctatgatagtcttaaagaggctctattcctgtaacattaagaaatcatctgctgcttctgtgatttttaaaaaactagatcaatccctagtttttataaaatcttcttattaataatatcagccaggcatggaggccaactcctgtaatcccagcactttgggaggctgaggtgggtggatcacttgagcccaggagtttgagaccagcctgggcaacaaagtgacaccccatttctacaaaaattaaaaataaaaaaattagccagcatggtggcacatgcctgtggtcccagctacatgggaggctgagacagaaggatcccttgaacccagtaggtcaaggctgcagtgggctgtgttcacataactgcactccagcctgggtgatgatagagcaagatcatgactcaaaaaaaaaaagaaaaaattacaaaatccccattgtttataggaaaattgtagcctgatcctaataaataaaaatatgacgttaaacacaagaactttccacactagaatagagattgtgtttttgtaaatggcttttctgaaaggttcttctaaataacaatatttatagtatatatgaaaatatttcatttttaaatttttagtttaaatgttccatataaaataccttttcaaaagcactgggaaatccttgtataaagcttgttttttgtcagccacagtaaatgactttagttggttgtttaaaaatgcttttattctgtttcatttgaaaatgcattcttgcctcttttttgtttgttttaaactttggtactcaaatacatgtcgcttgttctgtgatttatgttgcaatgctaagtgaataacgtacgtcatctaaggttatctaagtggggtttaggctgggagtggtggctcacacatgtaattccagcagtttgggaggccaaagtgggcagatcacctgaggtcaggagttcgataccagtctggccaacacggtgaaacctctactaaagataaaaaattagtcgggtgtagtggtacacatctgtaatcccagctactcggtaggctgaggctcgagaattgcttgaactgggaggcggaggttgcagtgaaccgagattgcgccactgcactccagcctgggcaacagagtgaaactccatctcatctcagaaaaataataaaataaatggggtttagattggaatttttcgaatccaaagttaacagtatgataaaacaaaagtgccagttgagtgtcttcatttcttacagtgctggtgtgggcagaacaggcacctatattgtaatagacagcatgctgcaacagataaaagacaaaagcacagttaacgtcctgggattcctgaagcatatcaggacacagcgtaactacctcgtccagactgaggtaaggagtagctgccagcgtcctcacgacattctggcaaatgctgtaactgaaatttgttaaatgataatgaagagacagattcattcttttagggcttgcagtaatttacaggtttgtattagaagatattctgacaatgatcctattctacggatcacagttttccatttctgtatggatcttaacatttggattcctaaataactacacaagtacttacgaaagagatacagttgtttcaagagctgtgttagatggtagggggagttaaacatgttgtctggcctgagaaatacataggagaggatggttctaaaacccttcattgaacacgattttttgtttgcttattgagttgaagcaataagcacagtatagaataccgtgatccaggcacagtatagaatacagagctaaacttaacacagtctctaccgtaaaataagttaagactgataaagtgagtattggagcaaatcacctagctgtaagtgcttgaaggaaatcactgggaggtccctgttagcagcagaattaaactaaggtacacttcatgaatgagtggctaacccttaacactccctcagtgactaccatgtattgtacctcttaggagcagtacattttcatccatgatgccttgttggaagccattcttggaaaggagactgaagtatcttcaaatcagctgcacagctatgttaacagcatccttataccaggagtaggaggaaagacacgactggaaaagcaattcaaggtagtgctttgaaaaagtttctttggcataaagcaagaaaatgttttaaatgccttgagtttgggggttatgtcttctttgcattaatgtatacaccgaaatggattactatttgtactccttgtactccttaaatgtgatgaaaaagaaaatacggttttgacctatgtatgaattgttggtattcaagtagatatacagtgttgtattttcttctgagcaatttatgactttatctgaatataaacatcagcccctggccataatgacatagtactttaaagtaactcgtttagtccaaaaaatgtcctattttttctgaactaatctatcttaccttaattattaagaatgatgacttgtagacatattgtcctaaaaatatgcctatttcaaaaactatttcagaagataatttaggaatttaaaaagaattactaaacaatactagagaaaagttaacttttcctaaatggttgttctttttctttgatagggacatgaagaagcttaaaagcggttaaggtttatatggaattgactgaagtgaaggtgaaaaagagagattataaggactattaaaataattagggctcagtcatctgataataaatcaaaattgcttctaactttcaaacatcgcctgtctctccagttaccaagtgctttcctatttatctttgtcttttaaattctattttgcacattgttctgtatgtaaatagtttctccctttgtatcaagattcaaagaatgagatgaatctacagttttagttttcatggtaaaactttccatagactgaaactttcatttgaatctcagctgaagaaatgagactgccaagcaaattataccaagtgatatgaaatgaaaaatagtttaatttcactgagttcagtcataaaattaaaaatttttagctccccattaacattctactataaaaccatgagataattaataatgaggacacagtgtatcattttaaatgtttaacatgagttcttacaaaatattaagtaccaacatttcttaaattctgcctttttcgtttcttcaatttttttttatacatactttaaaacttcatttaagaaatgcgaccaggtagttggttcttttacaggcactaaccattttagagctcaagatgaagaaaaaaacaagaatcaaacttgaaaatgaaaattatatccagggaccatgagttttactaaagcatctggagaagaacactgatctcatatactccattaggatggatgccagcccccaaaaaataggattgacaaaatggttcaaccaagctacataaacaggaataataatcaaactactgggctggttacttataaaagccttagaacaatgttagttcagttcaacagaaatgtactgagaactagttaagtactcctttatcttcaagaaacttgattagctcgtaatcaatagcattaagcaatcttttttaatgtagactcacgtaggtcttttatgccagtgaggatcacagaaaaaaattcacagcagcagtgacatcacataacagaagaatccacatagttctagaaatatctattgcacacagtacctatttctacctgatagtagaaataagaaagatacaatcaaggtcactgagagaagtaccactaggaaagcacaagagtgttctctggggctgggcatggtagattacacctgtaatcccagagcagcctgggaaacacaggaagaccccaattctataaacaattttaaaaattagctggttgtgctgatgcacctgtggtcctaactactcaggaggctgaggtgggaggatcacagttaactgagctacaatcatgccactgcactccagcctgggcaagagagcaagaccctgtgtcttaaaaggttctttgtggcacagaaatggtcttgtttatcagtaatctgattgggatttttgccaaagcatcaagcaaatgctatcaattatatctttgaatgaagactaaaatgttttttctttttcagctggtcacacagtgtaatgcaaaatatgtggaatgtttcagtgctcagaaagagtgtaacaaagaaaagaacagaaactcttcagttgtgccatgtaagactttaaaacagtttgttagtgatcttttatactggattgtatgttaggtacagaggcagccactactctgatgctattgatagcacccttcaattgtactgtacgtggccgtatggtagaaggttttgaaaatgtccttttagtaacctcattaatgtatgactttataccagcctcttacctggtactaccaaaagggaaaatgttatgcttattcaactaaggtagtttaatgaaactgggagaggtggttgtcagtgtcagcaagtgctccatctatctgacgtagaatacagcttcatttcaccttggaatgcaagaattgggttacttctaccatattataacataaaaaataataataaagctgttattgctgtggcattaacattcctctaaaacttagaatcctggattaatctgtacaactagaactaccttattcagttactgtggctattgagatcaaggcactgttgattggtggtgacctttgtataaatagctaaggacattgcagaggatgctgtctgtgtgctgtaggcatagacatgggtgatcatttgggagatttatctctaatgaaaaaggccactcttttctaagaccatcatgagcagaaagacatggagaaaggggttggtaaaaggacaaagtatatgttggtataattgtaggaataacaaactagagtcaaaagttatctaaaatcctctgttgtgtccatataaagtattctgttattgatctgctgtaaaaatctctcccacagtaaaactgtattcctacaatgcctgtgtccttctgggtatgtgcagcaaaatttcattttacattctgcctcagctgataacactttagcttgtttaaaaatatagataagtcttagaaagggaagccaggaggatatgttattcatcaagcaaatctcagaaagagctgttggttctgtgtgtataataaggcaaatgtggtgtttttgttttttccatatgatagctgagcgtgctcgagtgggtcttgcaccattgcctggaatgaaaggaacagattacattaatgcttcttatatcatggtgagagtcaacagttaattataaataaagtcaactaaactgaaaggtgttaaagagcagataccacctgtgtgactgatgtcatttttgaaataatttctcaatgtgtaatatgaaaagtatagagatttctgtatcttgaaacttttaacaaaagatacctaatcagtgctggtacaaaaatgcttaaattaagcagaatgcttcttaaggaattaattttattgttaatttcacacatctagtctttgaataaatgttgaaatttcccttaagtgaaaacagcagggttaactagaagtgaactgcacatggagagaaaattgtctgcacagtgctagcagaagtacatctaaaaattagccaaatgtaccgaatgcctttctcaattattttagtgtagtcaaaacagtgctatcttatttcatgaatatattttactaccacaaagttagaataaaacactcatattcactgattttttttgtcttcccaactgaagggctattataggagcaatgaatttattataactcagcatcctctgccacatactacgaaagatttctggcgaatgatttgggatcataacgcacagatcattgtcatgctgccagacaaccagagcttggtaagtaaagcacatctgctatatattaatgagcccatgaggctacaagcataaattactttgatactttgccatagggctatagtatccatatatgctagggagggaatttaaaatttttaaattctcatcttgaagtctgtggagattcctttcatagtctcacaatactgtccctatcagttccattacttgagtctctgatgctattgatatcacccttcaattgtactgtctgtggcggtgtggtagaaggttttgaaaatgtttttagtaacctcattaatatatgactacaccaacctcttccctgctgtatgtcacttttgaaaagtaaataattgtagcttacaggtactgagtatgtaactgtgtttacatgcattaacttgtttaattctcaacaattttaagacatacatactattattatctcatgtaatagctgagaaaactgagaacaaacttgctcaagagagcacacacaagtaactggagccaggattttaacctgagtcatctgtctccagagaccatgcttatataatcattttactgtatgtcttaccccaaaatattgtatcaaaagtactaatagtgaatttttttttcccactccataggcaagtcaggtctactgcagggataggctattttgttcccacttaaaggtctttaggactgagctgctactacttttccctcccttagtccttctctatttcagtctctaaactatacagaagggtgagcaagtttataaaacagacttaaatgtttctgcttagatcttgtggatacttaagtttcggaattagctgggtctataaaagttactgtgtggacatgtgaacccatgaggtaaaaacaaaaaacagtgaggatctgcctttatgatagtcagattaatgagttttttaatcaaggaagaacagcatgtgactgaacccccagtcttggtgacatgcatttgactgtgtgcccagtcagtaggaacttcttcactttgtcgcattttgctccagcttcaggataccaagactgcttctgtatgatggaatggcaacaaagttgagaatcttaaactaaaagctggagtgtaaattttcaaattagctggcaatagggtctattctgtttggcatgtggaaattggaggcacttagggttgttaaaacgttcatttgttggatgaatcagtattttgttattgtcacttaacagagggcaatcaccataaagcatctacccagcagctcatttgtatggggaggctggagggagactggaccaaataagtggatacatgttctgcagacactgaggatataggaacatggcatctcagtgtctctctgaggcctcagaaggctagattagaatcatatacaactgacctctcagttctgagatggagagtttcatcattgcacagtttttcctaaagattgatatctctgagttctttttgtttgttgtattattactgctatacctttaccaggtcataattctgtaaggagcccaaaagtcactgcttcctaactcacaaagtacggatatagatgcccagatatctttgacctataaatatacttgtaagcaaaacagtcatgagaccagtgtgcctgctgaattaagaagcagcatttatttttcttagactttcaagatgaaccatttttctacctttcttctaccataactcaaatccctttggtagcctttaagctagttaatttactattcatgttatcatcatagtatttctttaaagtaagtagtttttattcccacttttcagatctggaaattaaggttcagattaatttacccaggatcacatccactcataaatcctatgcttaatctgtgcatatttgttacatttagatgccctgttcattaccttatgtctttaatatctgtgtccttggacaaaacctattaaaacccacgacagttacagacttcttttgtatagactaaacccagttgctaatctgtttccccttatgctgagctttaaaaataaaaatgtacttggcaataagctatattgaaacttgaaagggtgataagtctcattggacgttggctcatttctaatgcaacaatgtaagattaaacaaagccttctttgttttgaacattattcagaattatttctgacttcaatgatagtagctaggcatcctcaggaaaatgcccgtagaaacctatatactacaggaaaactacagtttgccattggagctgattgattaggatacgtggtgtacatcataatcatatttctcacagtctccaacctatgcaacaattaactttctcttaggcatccatagtttttagggatagaattcaaggaccaagcctgcatatctatttttaatcttaaaatggatgaacatttaaagcttgcctgattcaaggctgaaagactttctatgttatcccctcttgaaatataacattgacagatttcttttaaaactgccttgtacatacagccaacctacttactcacacacaatcttccaaaaaagttctatcccttaccatttattagcagagtgattttagataatttatgggccccctccccaaggccttgtgtcctcatctgtaaagacaggtgatacaaaatctcctcagggttaatatacaaaatttgtacagaactcatacaactcagtagtagaatcatgaaatacctgatttaaatatgggcaaaagacctgaatagacatttctccaaggaagacataaagatggccaagaggtatatgaaaagatgctcaatctcattaattttcagggaaatgtaagtcaagataccccacacccattaggatagctattaaaaacaatcaaaagataccaaatgttggtgaggataacaaagaaaactctcacacactgttggtgggaatgtagattgctagagccatgatggaaaactgtctggaggtttctaaataaattaaaaatagaactaccataagacccagcagtccttcttgtgggcatatacccaaaggaagtgaaatcaacacctcgtaaagatatttgcactcccgttcattgcagcattattagcaatcgccaagatacggaaacaacctaagtttccatcaacagataaatggataaagaaatttgtggggtagggaggaaatgggaagatgtaaaataaatcaagaggatacaaaacaacagatgaggaagaacaagtttagagatctcatatccaacatgaggactacaggtaataaaattgcactgtatttgggaatcatgccaatattgagtacattttagctgttcctgccacaaaaatgaaagtgagatgatgggtatgttaatttgctcctaattatagtaacctttttactatctgtatgtatccaacatcatactgaaaatatacaagaaaacttacagtgtttatgaaagtcctttgcaaaatgcagttcaactacagaattattaacataatccacaggaaataattagcatgtcttgattgcttaagcaattgtgaaataacaaaattaactgacctagatcctgctttcttttttactatgtcaatattacagaatacttctcaactgtaataagtcccctatagtgggagtgtttcaggttgctacactaacaggtgagagatgctagaaaatgattatcaaaatatattttacaatagaatacaataaccattcaacttggtgtagttcgatgggaacatataactcttatgaattcagtttaaacgatggcttgagagggatgggaaatgacaaaatccgtatgcaagaaatagaaaacaaatccttgacagaactgcagaggctttttttttttttggattccaaaggcagaagatgagtttgtgtactggccaagtcgagaagaatccatgaactgtgaggcctttaccgtcacccttatcagcaaagacagactgtgcctctctaatgaagaacaaattatcatccatgactttatccttgaagctacacaggtaacctaaacctcagttcctcactaatagccatacctgggccctggatcatcattctaagtaataatgaaataatttaccaccctcaagccaggctcaggcatttgagtaagacttaattttaaatatgtacattttccgtttttcttccttcaaatatttgctttttccagctggctagatgaaatgtaacagttcctctgattcagcatgcatacaaataggtctgttgacctaattataaaaacaatatactagaactcaatattttctttgccatcagaaatgtaagctttgcaatgtgttgcacagatgataatactaagtttttttaagtaaatattttgctgccttcttgtgggatgagtaagcatgggggggctcttatattagtaatttaaaggatgagccccttccttgttttcctttaattttataaataagaaaatagagtaggatataaggtctttaataatttattgtcacttgaaatttttgactaagccaaatgaattgtttcactagcatgacctacttggttgtttgttttgagacaaggtctcactcacagtggcatcatcaaagctcagtgtaaccccaaactcctgggctcaagcgatcctttcacatcagcctcccgaatagcaaagactataggcatgtaccatatgactagttaatttttttttttttttaatttttttagagacagatctccctgtgttgcccaggtgggtcttgaactcctggcctcaagcaatcctcccaccttggcctcccaaagtactgaattacaggcatgaaccactatgcctagccatgctttttttaaaaaacaaaaaaacaaaaaaaaaaaaccttcctggtatttttcttctttccagctgtggtttggttaacacaacattgttgagagttacctataacacatggctttctcaggagcaagttctagtcattagattgtagatatgtgaaataaaggaagggatttgacccatgttgtattggttacaggatgactatgtcttagaagttcggcactttcagtgtcccaaatggcctaacccagatgcccccataagtagtacctttgaacttatcaacgtcatcaaggaagaggccttaacaagggatggtcccaccattgttcatgatgagtatgtatctgtttcttaattttaaaatgtagaccgtttttttgtttaatttcttgttgaaagcagtagaaaaggaagccagaattttaaaacctatcaacaacctcagcttgtgacaactccatgttatttctactgtggacatgtacaaagtgttgttgctctgtttacattttaatatgtcaaactcttccaagactccaggttcttctagagtatatgttctagaaaggggaaagtattatatcttagcctacagaggtagatctgcatgcatttagaggtgttatgtgttagtaacaaatgagtaaattaataactgtttaccttaattaaatactttttaaaaatccttacactgaatttcaaacacttgttagggaaataacctttaaaaatatgacttagttgatgagtagagataaaactactagtattaatgataatatttaaagttcatgatgtgttttaaagtcttcagtactgtcttttgggatttaaagaatatgaatctcaaagagaaaaataacttgcacctggtctcaaagcttctaagtgtcacaatggtatcccagcccagcacctttccactttaataagaaggaaagggtcatagatatatcttattgtatatagatatttggagccaaacttcatggcctgtaagtcagttgtataattgaatcgtttcaaatcacaaacctttagccaatatggaatcaattatacattcccatttttatttcagttccaaggtagctcttggtcagcagcattcattatgttcattaaattaccaactagctacccaagtagcataaagtattaataaatttgaaagtgaagcttattgtgaaggctttttttcctggcactaatgctgtatcatgatgtacacaagagctcagcaccttcacctcaaatcatagtactctcctacttgaagtaatgtgtactagctgcttccaaaaaattttacagtctttcaaaatgttggcctgactcttgattagtaaggtgaaaaattaagatttgaaaagcattacagttgaaacattaattaaatagcataagatcaatggaaatgtgacaaccatcaacagtgtttaaatagcacagacagcctcaaaataactggggagttgctactgaactaaaactttgtggtatacagttacagcataaagttagggcattttctagaattcctgggttttaccagctcttatcatctcttgtcatcaaattctaacgttactgcccagttatatgactgattttgctgttacggtagtactccgaggtgttttgtcctgaagtcagtaatgcacctaatcttatattttagggtaaggaaagaggaaaagaaaaataaccaccagttaaatactaaacagaagtgtttgattcacttatcttcattcaacttttcagtatatttgtcttatttagtgatttttatgtcacatgctgaaaatatatcccctccagaattaatcagatgtatacaggcctcattcttaggcctgtatacaaaaagagcaaattaatcctaaaccagtagatctgcaaatatcatataggtgagatgccttaaaagccaccagtagaaatgtattaattcatttatctactatctgtaggggataagttaattccattgaaattattgaagagaaactttaaaatttttgaacagttgctagctctagtgagatactctgaacaccagttccttttcagtttccatcttacctactttctgtacctctaaacatcacttcctgatgggctacaaacacgtcacattcagcatagctaaaaccaaactcatcttcactgcctgcccctaatcaacttaactgtacagaccagaaacatatcagagttatttttgagtctccctcacctccaagtctgattggccaccaagtcttcttggtgccatcgattctttcagtagacttttgaaaatcttttacaatctagtgtaaagtttacatttccagttgtcatcccaatctgccactgaagtacttcctgcatgccaccttgcccctgcaaatcctctttcctctgagcaccctttcattcaatacacagttcaaaagtcactctctgagactctaattcatcccagaggtgctaagcaaaatcattaacatgacaaccataccagataaatgtcattcctgcttatcatgtcacaccataattatttgtatacatgactgtcactctcacattgctgaggccagcaatggtaatttattcatcccagtctccaccgggggaaacccaatgcctgggacagcgtgggtactagacaagtatttgcacgaacgggtatgtgttttaaattgtggtaacttacaaactattaagtatatgtacccctataacaaattgtccccagaaagccttgctttttgtctcatttattgttcaaagtcattttggctgcttaaattcttcttttcaaagtgtttttaagctctgtcaaaagcaggagtcaacaggcttggagagaaggcctgcacgcatttgatctgtgaggcagagagttgaacttttagtgtgcaaatgttgtgacatctatttggtcttcatagagatctttttaacacctacttttgggggtggcaggtggttgttggggggggggggtctcaggtgtgtcccaggtggatgacatttctagataagtgagctaagaataaaattcctaaccaaaaagtaaactgcttctatttgaggacaggcacagcttaaagacaaactgcttcattctcagcattctattgtcaactgttcaagattattctgctcagaggctgatctacatcattattgtcaaattttaaaaacagctgggttcccatagatatttagaacataggcatggttctcatatagtcttataagacagctgtagatcagacctcacccaaattactctactcactcacagactgaagaagagttccctttgcaaatacttaattactcactctggagatacatgtatcaccctactggatagcataataatataaaaatactatctgccttattcatacccattctgtcatgagtggacaattaaaaagagttttccagaagtacatgacatgtgataacatcacttttagggctaatcgtattttaacattttctcagttttaatttctaatacagtaaatattgacatatacagcccaaatcccctggaggtcctcaataattttttattttaatttggccctgagatcaaagagtctaaagactgctgagatattctttaagtgacacaaggcatatggactgttttcaatagcaaaggctgcaaagacacccacaaatcataactaattccagtattttcgcttttattgagagccttatggaaggctttcatgttgtcttcttccctaagattgatacttattccagcttcaatttttttgttttcctttctgccctactgatttcaaaaggaagctgcatttcttcacagtgtcagggttataactctggatagcaatcttggttatgattttaaaaacaacgtattaaaagctacaataataagtaaatatatgaaatagtgaaaatggttaaatgctcacaggtattatcctgactatacaaggaatcacaatgtgttttaaaatgaatatagacagagcacttaaaaaaaaacattactgtacttcaggagcttaaagtactttcatttcttttgtaaaatctttgaagtaaataaaggcagggaaagatgaaaaaaatagggtttttttcttaacatcactagttaaataagcattacttttaatggagcccttagaggaagtggcaaacaaaatatcaaagccagtgaatttatatactactgtcattttacctaggttacagattacttataccacttttgcaccaagtccctgtagttttaaatgcaaatccatgaaactcgatgagcattctttaatcccacttagttcctaaacttttgaaagagaatggccctttttgtctttgctctgtcattatgtttggtatgcagaagatatttaaaagtatctgtgcatttgattgatttgacttgcgagtttcttgtcatgtttaagccatattgtataaatacttttaattttactgcttatttaaccgtggctaaatacaggaaaggcaacccatggaaaggtgagaataatctcacatggagtgcatgcatactccgtaaaaacatacatgttacctgacttttctatatggctggccacagatagctttgaaagagctaagaaaaaaggggagattcttaagtttaaccatttcactagaacagattaaacaaatgttaaattcttcccctcctaaacaaaatcagtacaaatgacttttttttaataccatgctaaaatgaggtcaactcagtacaatttagaatctgagggaagacaacatgctgaacaagaaccaaaaaccacaataaatcagagttaatagagctatcataatagggtattaaaatatatcctcagagatctaaaggaagattttatgaaatgaagaacatttattatgaaataggaacaaattcggcctaagaatgagaaaatacattaattcatgaaactaaaaacttaaaagataggatactagtggagtgtagaactgaaatgaaactagaatgtggaagtcacatacagaagttctaacatatgtctaaaaagttatccatggggcaataaaatacaggttaaagaggaagaaataacagctgaggttttctaaaaacagaataaagtattcagttcttaaactgagcgaccaggatacatttgatcagtagcattcagagagatttgaataccacagttaacaagcgtgatctaatagtgatatagagaagttcgcacccaagagagactgcacagagagacctagagtctcttcaaacacaaatggtttatttatatacataggccataaatggaatttcaatacattcccccaaaacagataccatacaaggctacattcattgattacaacccacttacattagaaaccaccagtgaaataacatcccaaatccttataactagaaacaactagaaactgaaatccttacatctaggattgcttataaataattcatgcatcaaagatgtaaccaaaataagtatttcacagtgtctaaaactaaatgatgatgaaggcactgcatttcaaaacctggtgaaatggagccaaactgtacttaaaaaaaaaaaaaaaaacagcctgtgtaaactctacatattagaaaggttaaaaataaacaaaccaagcattcagctcaagccagaaaaagcaccagagaaatcaacaaaaagtacaaggaattaaaagcaaatagaaggcgatagtaaaatttaagcaataaatagtttagtaagagatacagttttggaaatatgatgaaggaaaaaacctaccgtatatctgtagctacattaaaaacattcaagaattggccgggcacggtgactcacacctataatcccagcactttgggaggccaaggcgggcagatcaccaggtcaggagttcaagaccagcctggccaacatggcgaaaccccgtctctactaaaaatacaaaaattagctggacatggtggcaggcgccagtaatcccagctactcgggaggctgaggcaggagaatcgtttgaacctgggaggcagaggttgcagtgaaccaagattgcaccattgcactccagcctgggcgacagggtgatactccgtcacaaaaaaaaaaaaaaaaattcgaaagttgttaatttgcttaggtgtgatagtgtgttttctttaaatgcttatcttttagagtttgatactaaattatgactaaaacacctgagatttgcttcaatatatattggggacgaaacagaaatgaaatgagaatggccatgagctgttgatcattataactgaatgatgactacatgaatgctactgtactattgggctttggtgtctgtttaacattttctataataaaaagctaaaaataatacatattttaaaagaaagaaaataagcatttaagactttataactctatactaataaatgtttaagcctataaataagcatagtaaaataacatttagtgaacacatggtatgtggtgtgtgccaatctctgttctgagccatttacaagtatcagctcaattttaaactctagtctcactatgcgatcttggccagttacttcacctgaatgtgccttatttattcaacctcagaatgtgccttatttattcaacctgaaatggagataatactggtacccataccatagggttactgtgaggactaagtcagtacatgtaaatacctataagagaacatggcacatgaagtacaacacacgttagtgatcactaagaactgaataaaagaatgagttttccacctgttagggcccacaagtcctggccaaggctacatatgaacagtaacacacagaagatttaatgcaatgttgatttaaacaaacaaggcttagcaccagaatggaaatgtataggccaagtcttgcttatttgaacactgatgcaaaaatgacaataaaaagctgtctaataaaacccagtatattaaaagaattacacatcatgaaaaacttatcctagtaatgtagagctggtgttaagcttttgatatattatcaaaagtttatcagtgaattcaggacattttaagagacatttcaaaaaaaaatcgatattgaaaagcgtacaataaaacaacacccattcatgatcccccccccccaaaaaaaacacttagagtaaaaatagaaagcatcctctttacctttataattgttatttaccagatgtatattagcaaacatttaaatttaatattaaaaacttagaagcttgaacatttaagatacatgatacttgctttcagttctagcacgtaagcctatctaggtgctagccaacacagtaaaagcagaagatagaagaagcgtaaaagataaaaagagggaaagttcgcattattggcagataaagatgtggtcaactacctagagaagccacaaactattaaaacttaagcagggttcttctgtttgaccggatacaatttcaccatgtgaaaatcagtaaccttcccatgcatgaagtgaaaccaaacagaaaatgttatcacaaaaggaggccattaataggggtaataaactctaaagtacctaaaaatttaccaaaaatggaattggcaaagactataaagaaaacaataaaacctagttaaaagctataaaaggcctgaataaatggagaaaagacattgtgttcatgaagagaaaaactcaagattgaaaagatggtaatttcctcagatccatctatatattcagtgcaacctaatcaaaatcccaacaaaaatgtttgtttgtgttccttaacaatctggtttcaaaattactatgaaacacgatggagtcgggtggaaggtcagagttatttggacatcagtgtaccagtaaaaaatgaaaattatatgtttgaatcactaaaaacaatacgaagtaaatgtagagacagccaagactattacagaaacttgctttatcagatatcaagacttattaaggaattgggatacacgtggggaggtacaaaaaatagacaaacagaataaaaggtcaaaacagagttcagaaataggcttgcatatataagaatgtagtacatgataaaaaggaagctgatgtcagtgagaaaagatcacactgtaaaataagaagtgctgggacaactggttatccaatggaaaaataaaataactgtaatcagaccccttccttacatcaaagcaagaataagactcagatgaattagacaattaaacgtaaaaaagtaaaattagaacatgtaggagagtatctttaaaatacaaggttagagaaagcattctcaaacaagattccaaaaaaagccaaaaataaaagatgtatcaacttgattacatctaaactgtacttccgtataacaaaatgaccacaaacaatgttaagagaaacagatcggggggcaaaaaaactcacaagtactacagacactataaaaataactcctatataaatcattttggaagaggcaaacttagtagaaaagtgttaattaggcgatttcagaagaggaaatatagatggtcagtattcataaaaagacattcagcctccctggtaatcaaggaaatgtaaattaaaaccctagtaagatacagtcttccactcatcagattggcaaaagtgtttcaagtttaaaatgatgaggagaagcaagtgttctcgtgctgggaatagtatgaacaggtaacagccacttgggaaagaaatatggcagtgtctttaaaactaaaaacaggcatacctgtgaccctagcccttctactcagtacctatgctaaagtgcacaaattcaaacaagctaaatgtccatctagaaggtaaacctggtatgcatgtagcagatgaaataatgagttgaactgaaatgtagtgatacacctaaatctggaaggctgtatctacacgtgtaataatttttacctctggagaggttacctctaaagttggggggtggctaagggggactctggtcttatttgtattaaagatataaaacatgtaatattttaattttatgtaacaattcagaaatgacatttaagtttttcaaaaaacaatgggcacagggcatctgaactccagtctcatttctgccaccagccagcaacatcatcttgaacaattcatttaatccatctgttttctcatcactaatgtggaaactgtgtgccatcacagattcttgtgaaaagtggagttgccaacctggcctgatggaaatttactacctttctaagacttttttgtgaggcaaagagaaccacatttatctttccaaggatttcatagaaagtgctctcattaggaaagttccacttcagtgccaaaataattatttcatatgaaattaattttggaaattgtctgttttgagccatataattccatttttaaatttttcatattctgtaagttcaatttaactgtttggaattgttaaaaaaaaattcagagcccttcatcactggctgcttgtccaataacgtctagttaagaggttctctttattgttttttctattgtaccacccaactcatcaccaacaccaaatcatctttagctctcctaagtctacttctgaacctctcatttcctattagatatcaagctaaacgtctcatgaaccaatttgggatactccactttcataaacaaatctcacctttatgctagcttccaaatccctcccccaccagcatttcattcagtcgtgtctttagagtaaatgtcaaaacagtctacttagtttctatgaaaatacatgacagtaatttcatttcaatatatttggtccctttgtacatctgaaatcgtatcttttttttttctcccccaggtatggagcagtttcagcaggaatgttatgtgcccttaccaccctgtcccagcaactggagaatgaaaatgctgtggatgttttccaggttgcaaaaatgatcaatcttatgaggcctggagtattcacagacattgtaagtagtttgcttatgtgtaaaacctgtactacatcagttgaaactcagactcacagtttagagcagtagttctcaattgggggtgattttgccccccaggggacatttggccatgtctggagacttttttgcttgtcacaactgcagatggatggcatctagaggatacaagccagagatgctgctaagcaaactacacagcacaagacagccctcaacaccatagaattatgtggcccaaaatgtcagtagtgctcaggttgagaagccctgctttagaggatagtattctctggttatcttcattaaccagatattaaccagatattggttatcttcattaaccaataatgattgttcattaacaatcagcactgagaattggttccaagctaacagagatcaaaaggacatgaagaaggtataggtcttgactataataaattcaaatgattttttttttagtttttttagataacatttatgctattgctgtttctctagtgtgtttttcacaattaccattttaattggtatttccaccttatgtgaaatcactaaactgttctttggctcaaactgtcttcctcttgtttttcaggaacaataccagttcatctataaagcaatgcttagcttggtcagcactaaagaaaatggaaatggtcccatgacagtagacaaaaatggtgctgttcttattgcagatgaatcagaccctgctgagagcatggagtccctagtgtgactggaatcctgaaagggcacttaatttgtaaacttctgaagactgagaacttttttgaggccttttttgccagactctaggttatacaataacccagttacttttttacactgataaaagttttgatatttattttttgccattttatgtcttaatggtatcctactgagcatttgcacctctgttcatttcacacagtgaaacgcaattttacctagtttgcactatatgatcagtgttactgcctataatcttatacaacagcaaaccctgatgtgacattccatgacgacatacatgctacttttttttagttcaatacagtgaaggtctttgttatgacagtgaatattgcttttattattattattgctgaagtggttgcattctactagcaggcaatgctgtacttttcttcagtcctcctctcctttttattttaggcactgttcaatactgtatgccttctgtattttaatggagtggatagcattgttttcttttacagactagcaggctactgggacctaaaaaggtctgttaatgtcatggccttgaaacagttccatttatgctggttaagagatcccttaagaagttagaaggcttaagaactgcttcatgtgaacatcccttattagttacaaagttatattcacagttttttaaaaatgtgtcaaaataaaggataactctgtattacagctttcacagtagctatgtggacaatgtgttatttccattttgactctctaaaatagctacatcctaaaatcagggctatctttaacaatagcaagatagcaatattatatacaactcagttatgagaccctttagttattctccattaatgcttcttagtttgtaataccatacctcacagtaggtagaagaatgaaaacttctgcaggtgtgtaattttgaaactagtcctctaaaaattccctattactcctatagcaatctaataaaaactacctacatagttactgttttctttccttctttgccaaatgttttataataaatctcttaattacatacatttttctacttaagattaaattggaaatactgtcttagcaaaagtcttgggactatctaaactcccacacatagataaatctgatttggagagagaaatttaaaatatttaattaaaggtgatacccacattttcaagtttttaaaagagggagatggctttgtatgcttttgtgtagtttagaacagatacacattagtaaaagataccaataatcattagagctcaaggaagttattaggtgcagcctctggagccatactcacgctgcagtgcataatgggaaaattaggagcattaataagaaatttcagtagtgtttgtaaggaaaataagctacttactgagatctgtttcttctattgcatgtttgcttttgagggacagcttctgtcaaaagtgaaatcatcaccagaactgggcctgttaggaagaatagggttttatttactttttatgtcaattaacttcaacaaaaaggccacgctggctgctgtcatgccatctgggtatgcattaaacattaatgatgatcagcactgaggttctatttatcttgatttggctttcataaagtttgtcagaatggtgctggaggaccagaagtgctaaggagaaagaagctatgggccaagttaaagaatttgaatgcaaaggccaggtcaatggagttttcataaactacataatttaccagggtttatctcatcttctcaatacatagatttaacaacatggaatactctgcttttcaagagctgcgtaagctagtcctgagataagatgttcaagagagcatgctaagttgcatgtgctagatgagagacacctttacagcccctccgctccaaccagaggtgacacaggaagctctgtaaagttcaagtaaagcttgaacacaggaacactacaactgccagatgctgaggagaatcaggaaagcaatgagctagactctttttttagtcaattaagtgggttgttttagatgtatagagtattgatatgagttaacactttttagtagatggcaaagtgggcttgatgttcaaaagtaatgttcgagttagggttcatggtccctttctcagtaattttttcttaataaaagtaaacactggttcaaagacaaatagcaagtattccctcctgtgctatttatagagggctcaattcgtagaaaggcataccctccaatgcaattctgtggctgtcccttacagtggtttcagaatcacgaaaaaacagctagtaaataggatagaaacaataaaagaaagagtttagaagttccctgtgagcaatctgtgtgtcttcagcgagcttgaaccaaagtcttcatatcctgacccactgaattataagcaattgctacttgcccatcttgccaaagtagtccaaacacacttcaatgaggacagttatatttagcaggtcctcacccctgcaagagacagcatatcctcactattattattcatgtgttattggcaaaaacatagcttgcatctttccagaggcagagtttcaaagacagggttttctttgagacataagcacattgcttaagtacataacaaggttattaacacttgcactcaggggaaaggaaatagctattgcaaattaatgtgtgcaacttaataaaataagctgtttgtgtatatgaatttagctctaggtaagcaaaatgcacacatcatataaaaataaattgcaatgatcagaccaagtggctgtgctggacatcaaagaaaagacatgctgttgccatcaggagaactctttcttatatgcgatagccaagatatcttctttaatatgaaaaaagttaatttctgaatttcaaaaagagtaagattagctaattggtcttcctaatttttatgcctttagagtttttagtctattcaagtagaagagtccagcgaggccaaagaagggttacggtgttcaagttctggttgttggagtttttagcccagagtgacatactgaaatcagtaaataattattttataatgacacagcacaactgccttg
